(19) United States
(12) Patent Application Publication
(10) Pub. No.: US 2023/0416822 A1
(43) Pub. Date: Dec. 28, 2023

(54) DETECTION AND TREATMENT OF CONDITIONS CHARACTERIZED BY PERFUSION SHORTAGE

(71) Applicant: Falcon BioScience, LLC, Brooklyn, NY (US)

(72) Inventor: Henricus J. DUCKERS, Brooklyn, NY (US)

(21) Appl. No.: 17/926,306

(22) PCT Filed: May 19, 2021
(86) PCT No.: PCT/US2021/033254

§ 371 Date: Nov. 18, 2022

Related U.S. Application Data
(60) Provisional application No. 63/027,289, filed on May 19, 2020.

(51) Int. Cl. C12Q 1/6883

(52) U.S. Cl. CPC C12Q 1/6883; C12Q 2600/158

(57) ABSTRACT

Methods of detecting a condition comprising neoangiogenesis, ischemia, or both, or risk thereof in a subject. Methods of inhibiting, ameliorating, delaying the onset of, reducing the likelihood of, treating, or preventing a condition comprising perfusion shortage (such as neoangiogenesis, ischemia, or both) in a subject in need thereof are described. Kits are described.

### CROSS-REFERENCE

[0001] This application is a National Stage under 35 U.S.C. 371 of International Patent Application No. PCT/US2021/033254, filed May 19, 2021, which claims the benefit of U.S. Provisional Patent Application No. 63/027,289, filed May 19, 2020; the disclosures of all of which are incorporated herein by reference in their entirety.

### SEQUENCE LISTING

[0002] This application contains a Sequence Listing, which has been submitted in .txt file and is hereby incorporated by reference in its entirety. Said .txt file is named “Sequence Listing.txt”, was created on May 19, 2021, and is 1,804 bytes in size.

### FIELD

[0003] The present disclosure is related to detection, prevention, and treatment of conditions comprising perfusion shortage, such as conditions comprising neoangiogenesis, or ischemia, or both.

### BACKGROUND

[0004] Diseases comprising perfusion shortage can include neoangiogenesis, ischemia, or both. Ischemic diseases are diseases in which a lack of tissue perfusion (usually due to vascular disease) results in oxygen deprivation and pathology (for example, infarct, lack of function, or chest pain). Example ischemic disease include, but are not limited to, cardiovascular disease (e.g., angina pectoris, coronary artery disease. myocardial infarction, microvascular disease), cerebrovascular disease (e.g., TIA, stroke, microvascular disease) and peripheral artery disease (e.g., claudication). The prognosis and therapy responsiveness of other diseases are also dependent on tissue perfusion, ischemia, or both (including, but not limited to, oncological disease, diabetes mellitus, kidney disease, pulmonological disease, ophthalmological disease, gynecological disease, but also determines outcome and therapy response in for instance, but not limited to sepsis, inflammation, oncological disease and mechanical ventilation of patients).

### SUMMARY

[0005] In an aspect, the present disclosure describes methods for analyzing a biological sample, comprising (a) obtaining said biological sample from a subject; (b) wherein when said subject is a female subject, assaying expression levels of two or more genes from a female targeted set of genes to generate an output comprising said expression levels from (b) indicative of said female subject's having or risk of having a condition comprising perfusion shortage or neoangiogensis; and (c) wherein when said subject is a male subject, assaying expression levels of two or more genes from a male targeted set of genes to generate an output comprising said expression levels from (c) indicative of said male subject's having or risk of having a condition comprising perfusion shortage or neoangiogensis.

[0006] In some embodiments, the subject has or is at risk of having a condition comprising perfusion shortage. In some embodiments, the female targeted set of genes comprises a plurality of genes listed in Tables 1, 3, and 5. In some embodiments, the male targeted set of genes comprises a plurality of genes listed in Tables 2, 4, and 6. In some embodiments, the methods further comprise obtaining a range of control expression levels of said female targeted set of genes.

[0007] In some embodiments, the assaying comprises comparing said expression levels of (b) with said range of control expression levels of said female targeted set of genes. In some embodiments, the methods further comprise obtaining a range of control expression levels of said male targeted set of genes. In some embodiments, the assaying comprises comparing said expression levels of (c) with said range of control expression levels of said male targeted set of genes. In some embodiments, wherein when said expression levels from either (b) or (c) are outside said range of control expression levels, the subject has said condition comprising perfusion shortage or neoangiogenesis is at risk for having said condition.

[0008] In some embodiments, the biological sample comprises isolated hematopoietic endothelial precursor cells (EPCs), fractions thereof, or secretions thereof. In some embodiments, the hematopoietic endothelial precursor cells (EPCs) is Flk-1+. In some embodiments, the hematopoietic endothelial precursor cells do not express a cell surface marker, Flk-1. In some embodiments, the hematopoietic endothelial precursor cells are positive for makers selected from Flt1, Flt4, VEGFR1, CXCR4, CD31, CD34, CD105, CD133, Sca-1, and c-Kit. In some embodiments, the output from (b) and said output from (c) both have an accuracy greater than about 84%.

[0009] In another aspect, the present disclosure provides the methods for analyzing a biological sample obtained from a subject, comprising: (i) subjecting a plurality of hematopoietic endothelial precursor cells (EPCs), fractions of said plurality of hematopoietic EPCs, secretions of said plurality of hematopoietic EPCs, or any combination thereof isolated from said biological sample, to a gene expression analysis, wherein said gene expression analysis comprises assaying expression levels of two or more genes from a plurality of identified genes; and (ii) generating an output comprising said gene expression levels, wherein said gene expression levels are indicative of said subject's having or risk of having a condition comprising perfusion shortage at least in part based on said expression levels.

[0010] In some embodiments, the plurality of hematopoietic EPCs comprises a cell surface marker of Flk-1/KDR. In some embodiments, the plurality of hematopoietic EPCs does not comprise a cell surface marker of Flk-1/KDR. In some embodiments, the plurality of hematopoietic EPCs are positive for makers selected from Flt1, Flt4, VEGFR1, CXCR4, CD31, CD34, CD105, CD133, Sca-1, and c-Kit.

[0011] In another aspect, the present disclosure provides methods of analyzing a biological sample obtained from a subject, comprising: (i) subjecting a biological sample obtained from said subject to a gene expression analysis, wherein said gene expression analysis comprises assaying expression levels of two or more genes from a plurality of identified genes; and (ii) generating an output comprising said gene expression levels indicative that said subject has or is at risk of having a condition comprising perfusion shortage with an accuracy that is greater than 91%, wherein when said assaying comprises a method selected from the group consisting of cDNA chip array analysis, quantitative (RT) PCR, microarray analysis, multiplexing, Luminex analysis, nucleic acid sequencing, northern blot analysis, genomic high throughput sequencing, nanostring, massive parallel signature sequencing (MPSS), serial analysis of gene expression (SAGE), enzyme-linked immunosorbent assay (ELISA), protein sequencing, mass spectrometry (such as MALDI TOF, QTOF, or SELDI TOF), quantitative western blot analysis, and peptide barcoding.

[0012] In some embodiments, the biological sample comprises isolated hematopoietic endothelial precursor cells (EPCs), fractions, or secretions thereof. In some embodiments, the plurality of identified genes comprises a female targeted set of genes and a male targeted set of genes. In some embodiments, the female targeted set of genes comprises a plurality of genes listed in Tables 1, 3, and 5. In some embodiments, the male targeted set of genes comprises a plurality of genes listed in Tables 2, 4, and 6.

[0013] In some embodiments, the methods comprise obtaining a range of control expression levels of said female targeted set of genes or of said male targeted set of genes and comparing said gene expression levels from (i) of either claim 12 or claim 13 to said range of control expression levels. In some embodiments, the said expression levels from (i) of either claim 12 or claim 13 are outside said range of control expression levels, said subject has perfusion shortage or is at risk for having said condition comprising perfusion shortage.

[0014] In another aspect, the present disclosure provides methods of analyzing a biological sample, comprising: obtaining said biological sample from a subject that has or is at risk for having a condition comprising perfusion shortage, wherein said perfusion shortage is at an early stage and has not caused any detectable tissue damage; assaying expression levels of two or more genes from a plurality of identified genes to generate an output comprising said expression levels indicative of said subject's having or is at risk of having said condition comprising perfusion shortage.

[0015] In some embodiments, the perfusion shortage is neoangiogenesis. In some embodiments, the perfusion shortage is ischemic heart disease. In some embodiments, the subject is a female subject, further comprising assaying less than 60, 40, or 14 genes from said plurality of genes listed in Tables 1, 3, and 5. In some embodiments, the methods comprise assaying less than 14 genes from said plurality of genes listed in Tables 1, 3, and 5. In some embodiments, the subject is a male subject, further comprising assaying less than 40, 25, 15 genes from said plurality of genes listed in Tables 2, 4, and 6.

[0016] In some embodiments, the methods comprise assaying less than 15 genes from said plurality of genes listed in Tables 2, 4, and 6. In some embodiments, the output has an accuracy greater than about 99%. In some embodiments, the output has an accuracy greater than about 98%. In some embodiments, the output further comprises providing an assessment of a severity of said subject's perfusion shortage. In some embodiments, the output further comprises providing a prognosis report of said subject's perfusion shortage. In some embodiments, the output further comprises providing a response report of said subject upon, during, and/or after a medical intervention. In some embodiments, the output further comprises providing a monitoring report of said subject before or after receiving said medical intervention.

[0017] In some embodiments, the methods further comprise providing a treatment to said subject, wherein said subject has or is at risk of having a condition comprising perfusion shortage, at least in part based on said output. In some embodiments, the treatment comprises administering an anti- or pro-ischemic medical intervention, anti- or pro-neoangiogenesis medical intervention to the subject, invasive monitoring, advanced imaging, or any combinations thereof. In some embodiments, the medical intervention comprises a pharmacotherapy, or surgical or percutaneous procedure.

[0018] In some embodiments, the surgical or percutaneous procedure comprises a bypass surgery or a percutaneous coronary procedure. In some embodiments, the medical intervention comprises administering a pharmaceutical composition selected from the group consisting of beta-blockers, calcium channels antagonists, nitrates, aspirin, cholesterol-lowering compounds, angiotensin-converting enzyme (ACE) inhibitors, and ranolazine. In some embodiments, the medical intervention targets one or more genes listed in Tables 1-6. In some embodiments, the medical intervention further comprises modulating expression levels of one or more genes listed in Tables 1-6.

[0019] In some embodiments, at least based in part on response report, prognosis report, or both, the methods further comprise ceasing said medical intervention. In some embodiments, at least based in part on monitoring report, the methods further comprise employing advanced imaging comprising invasive angiography, advanced imaging, nuclear imaging, MSCT, MRI analysis, tissue biopsy, monitoring of mechanical ventilation, or a combination thereof. In some embodiments, the subject does not have any symptom. In some embodiments, the subject is at least diagnosed with one of ischemic cardiovascular disease, ischemic heart disease, coronary artery disease, cardiovascular congenital disease, stroke, transient ischemic attacks, microvascular disease, microvascular dementia, claudication intermittents, Burgers disease, Thromboangiitis obliterans, Buerger disease, lymphangiogenic disease, hypertrophic or dilating cardiomyopathy, heart failure, pulmonary and peripheral emboli, oncological disease (including solid tumors, and hematological and lymphogenic metastatic oncological disease), macro angiopathy, micro angiopathy, neo angiogenesis, diabetes mellitus, ophthalmic disease, nephrological disease, orthopedic disease, gynecological disease, Parkinson's disease, multiple sclerosis, inflammatory or auto-immune disease, erectile dysfunction, sports injury, Crohn's disease, colitis ulcerosa, pulmonary fibrosis, COPD, emphysema, and cystic fibrosis. In some embodiments, the subject has at least one symptom of chest pain, chest discomfort, shortness of breath, limited exercise tolerance, ventricular or atrial arrhythmia, profuse sweating, aphasia, loss of motor or sensory function, and vision disturbance. In some embodiments, the subject has at least one risk factor for having a condition comprising perfusion shortage, wherein said risk factor is selected from the group consisting of high blood pressure; glucose intolerance; family history of cardiovascular disease, hypercholesterolaemia, or dyslipidemia; aging; smoking; physical inactivity; obesity; previous cardiovascular disease; diagnosis of diabetes mellitus, kidney disease, peripheral artery disease, or metabolic syndrome; gender; high low density lipoprotein (LDL) level; high cholesterol level; and specific DNA polymorphism associated with higher cardiovascular risk.

[0020] In some embodiments, the hematopoietic EPCs are positive for makers selected from VEGFR2, CD309, Flt1, Flt4, KDR1, VEGFR1, CXCR4, CD31, CD34, CD105, CD133, Sca-1, and c-Kit. In some embodiments, the methods further comprise isolating said Flk1+ cells, fractions thereof, or secretions thereof from a biological sample of said subject. In some embodiments, the biological sample is selected from the group consisting of blood or blood fractions, saliva, urine, stool, cerebrospinal fluid, semen, vaginal secretions, sputum, sweat, breast milk, synovial fluid, mucus, tears, bile, gastric fluid, interstitial fluid, transudate, exudate, and tissue biopsy.

[0021] In some embodiments, the assaying further comprises detecting nucleic acid expression levels, splice variant expression levels, peptide expression levels, or any combination thereof corresponding to said plurality of genes listed in Tables 1-6.

[0022] In some embodiments, the methods further comprise detecting said nucleic acid expression levels or splice variant expression levels or both expression levels comprising employing cDNA chip array analysis, quantitative (RT) PCR, microarray analysis, multiplexing, Luminex analysis, nucleic acid sequencing, northern blot analysis, genomic high throughput sequencing, nanostring, massive parallel signature sequencing (MPSS), and serial analysis of gene expression (SAGE), or any combination thereof. In some embodiments, the methods comprise detecting peptide expression levels comprises employing enzyme-linked immunosorbent assay (ELISA), protein sequencing, mass spectrometry (such as MALDI TOF, QTOF, or SELDI TOF), quantitative western blot analysis, and peptide barcoding, or any combination thereof. In some embodiments, the methods further comprise transmitting said output onto an intranet or internet.

[0023] In some embodiments, the methods further comprise at least one of: identifying a previous episode of the condition in the subject when the expression levels of at least two genes from Tables 1-6 are outside of a range of control expression levels of said at least two genes from Tables 1-6; diagnosing the subject as having the condition when the expression levels of at least two genes from Tables 1-6 are outside of a range of control expression levels of said at least two genes from Tables 1-6; determining the subject to be at risk of the condition when the expression levels of at least two genes from Tables 1-6 are outside of a range of control expression levels of said at least two genes from Tables 1-6; prognosticating an outcome in the subject based on a presence of, or degree to which the expression levels of at least two genes from Tables 1-6 are outside of a range of control expression levels of said at least two genes from Tables 1-6; predicting a response of the subject to a medical intervention based on a presence of, or degree to which the expression levels of at least two genes from Tables 1-6 are outside of a range of control expression levels of said at least two genes from Tables 1-6; selecting a medical intervention for the subject, (for example such as, by way of a surrogate marker) based on a presence of, or degree to which the expression levels of at least two genes from Tables 1-6 are outside of a range of control expression levels of said at least two genes from Tables 1-6; selecting a dose and/or frequency of a medical intervention based on a presence of, or degree to which the expression levels of at least two genes from Tables 1-6 are outside of a range of control expression levels of said at least two genes from Tables 1-6; validating a candidate medical intervention based on an effect of the candidate medical intervention on a presence of, or degree to which the expression levels of at least two genes from Tables 1-6 are outside of a range of control expression levels of said at least two genes from Tables 1-6; measuring a response to a candidate medical intervention, wherein the measuring comprises the expression levels of at least two genes from Tables 1-6 are outside of a range of control expression levels of said at least two genes from Tables 1-6; monitoring a subject's response to a medical intervention based on the expression levels of at least two genes from Tables 1-6; or treating a subject with a nucleotide sequence listed in Tables 3 and 4 or a peptide sequence listed in Tables 3 and 4.

[0024] In another aspect, the present disclosure provides a kit comprising a plurality of probes that is configured to detect expression levels of two or more genes listed in Tables 1-6. In some embodiments, the plurality of probes is a nucleic acid probe configured to bind to a sequence of a gene listed in Tables 1-6. In some embodiments, the plurality of probes is an antibody configured to bind to a protein encoded by a gene listed in Tables 1-6.

[0025] In another aspect, the present disclosure provides methods of profiling gene expression for determining one or more genes as signature for a perfusion shortage risk, comprising: (a) assaying gene expression in a cell from a subject with a perfusion shortage risk, and a control set; (b) detecting a subset of genes expressed at an altered state in the cell of the subject compared to the control set; (c) using a machine learning algorithm for analysis of a combination of genes expressed at an altered state to determine the sufficient number of such genes to identify a gene expression signature for a perfusion shortage risk; (d) rectifying a possible accuracy score based on a follow-up monitoring period with the subject; (e) generating an output of one or more genes that is a signature for a perfusion shortage risk, such that the signature has a predictive accuracy of a perfusion shortage risk that exceeds 66%.

### BRIEF DESCRIPTION OF THE DRAWINGS

[0026] FIG. 1 shows a plot exemplifying percent accuracy (Accuracy %) scores to diagnose ischemic heart disease using various combinations of RNA probes in female subjects, with the indicated number of selected probes using different statistical methods as indicated. As used herein, “accuracy” has its ordinary and customary meaning as would be understood by one of ordinary skill in the art in view of this disclosure. It refers to the percentage of results that are neither false positives nor false negatives. Accuracy may be represented mathematically as 100%−((type 1 error)+(type 2 error)). Type 1 error may also be referred to as “alpha error.” Type 2 error may also be referred to as “beta error.” A combination of 8 to 14 RNA probes is able to predict ischemic heart disease in female patients with near 100% accuracy (or >99.95% accuracy). The X-axis depict the number of nucleotide RNA probe biomarkers in the diagnostic classifier. The Y-axis depict the accuracy of diagnosis for ischemic heart disease in a cohort of subjects with symptomatic chest pain (n=244). These subjects were referred by the general practitioner for further analysis of complaints suspect for ischemic heart disease (i.e. coronary artery disease; CAD disease) in the cardiology outpatient clinic. The correct diagnoses of these patients were prospectively and retrospectively verified at baseline using standard-of-care/best-of-care diagnostic analysis, and by clinical follow-up at 6 month follow-up The different prediction curves in the graph depict the different biostatistical analysis algorithms used in the analysis of female subjects: grey closed circles depict Diagonal Discriminant Analysis; black closed squares depict Fisher's Discriminant Analysis; black open squares depicts partial Least Squares w subsequent logistic regression analysis; black closed circles depict Partial Least Squares analysis w subsequent Random Forest analysis; black open circles depict Quadratic Discriminant Analysis.

[0027] FIG. 2 shows a plot exemplifying percent accuracy (Accuracy %) scores to diagnose ischemic heart disease using various combinations of exon biomarkers in female subjects with fitted curves for exons expression levels using different statistical methods according to some embodiments. A particular exon expression level is indicative of a gene expression level associated, which the gene comprises the particular exon region. The X-axis depict the number of nucleotide RNA Exon biomarkers in the diagnostic classifier. The Y-axis depict the accuracy of diagnosis for ischemic heart disease in a cohort of subjects with symptomatic chest pain (n=244). These subjects were referred by the general practitioner for further analysis of complaints suspect for ischemic heart disease (i.e. coronary artery disease; CAD disease) in the cardiology outpatient clinic. The correct diagnoses of these patients were prospectively and retrospectively verified at baseline using standard-of-care/best-of-care diagnostic analysis, and by clinical follow-up at 6-month follow-up. The different prediction curves in the graph depict the different biostatistical analysis algorithms used in the analysis of female subjects: grey closed circles depict Diagonal Discriminant Analysis; black closed squares depict Fisher's Discriminant Analysis; grey open circles depict Linear Discriminant Analysis; and black open squares depicts partial Least Squares w subsequent logistic regression analysis. A combination of 9 to 14 exon biomarkers is able to predict ischemic heart disease in female patients with about 98% accuracy.

[0028] FIG. 3 shows a plot exemplifying percent accuracy (Accuracy %) scores to diagnose ischemic heart disease using the expression levels of various combinations of genes (for instance as detected by nucleotide biomarkers) in female subjects. The X-axis depict the number of gene biomarkers in the diagnostic classifier. The Y-axis depict the accuracy of diagnosis for ischemic heart disease in a cohort of subjects with symptomatic chest pain (n=244). These subjects were referred by the general practitioner for further analysis of complaints suspect for ischemic heart disease (i.e. coronary artery disease; CAD disease) in the cardiology outpatient clinic. The correct diagnoses of these patients were prospectively and retrospectively verified at baseline using standard-of-care/best-of-care diagnostic analysis, and by clinical follow-up at 6-month follow-up. The different prediction curves in the graph depict the different biostatistical analysis algorithms used in the analysis of female subjects: grey closed circles depict Diagonal Discriminant Analysis; black closed squares depict Fisher's Discriminant Analysis; grey open circles depict Linear Discriminant Analysis; and black open squares depicts partial Least Squares w subsequent logistic regression analysis

[0029] FIG. 4 shows a plot exemplifying percent accuracy (Accuracy %) scores to diagnose ischemic heart disease using various combinations of RNA probes as nucleotide biomarkers in female subjects using Diagonal Discriminant Analysis versus Linear Discriminant Analysis. The X-axis depict the number of nucleotide RNA probe biomarkers in the diagnostic classifier. The Y-axis depict the accuracy of diagnosis for ischemic heart disease in a cohort of subjects with symptomatic chest pain (n=244). These subjects were referred by the general practitioner for further analysis of complaints suspect for ischemic heart disease (i.e. coronary artery disease; CAD disease) in the cardiology outpatient clinic. The correct diagnoses of these patients were prospectively and retrospectively verified at baseline using standard-of-care/best-of-care diagnostic analysis, and by clinical follow-up at 6-month follow-up. The different prediction curves in the graph depict the different biostatistical analysis algorithms used in the analysis of female subjects: black closed circles depict Diagonal Discriminant Analysis; and grey closed circles depict Linear Discriminant Analysis. A combination of 8 to 27 RNA probes as nucleotide biomarkers is able to predict ischemic heart disease in female patients with near 100% accuracy.

[0030] FIG. 5 shows a plot exemplifying percent accuracy (Accuracy %) scores to diagnose ischemic heart disease using various combinations of exon biomarkers in female subjects using Linear Discriminant Analysis. The X-axis depict the number of nucleotide RNA Exon biomarkers in the diagnostic classifier. The Y-axis depict the accuracy of diagnosis for ischemic heart disease in a cohort of subjects with symptomatic chest pain (n=244). These subjects were referred by the general practitioner for further analysis of complaints suspect for ischemic heart disease (i.e. coronary artery disease; CAD disease) in the cardiology outpatient clinic. The correct diagnoses of these patients were prospectively and retrospectively verified at baseline using standard-of-care/best-of-care diagnostic analysis, and by clinical follow-up at 6-month follow-up. The prediction curve in the graph depict the use of Linear Discriminant Analysis in the prediction of the disease allocation of the female subjects. A combination of 9 to 58 exon biomarkers as nucleotide biomarkers is able to predict ischemic heart disease in female patients with about 96-99% accuracy.

[0031] FIG. 6 shows a plot exemplifying percent accuracy (Accuracy %) to diagnose ischemic heart disease using various combinations of RNA probes as nucleotide biomarkers in male subjects. The X-axis depict the number of nucleotide RNA probe biomarkers in the diagnostic classifier. The Y-axis depict the accuracy of diagnosis for ischemic heart disease in a cohort of subjects with symptomatic chest pain (n=244). These subjects were referred by the general practitioner for further analysis of complaints suspect for ischemic heart disease (i.e. coronary artery disease; CAD disease) in the cardiology outpatient clinic. The correct diagnoses of these patients were prospectively and retrospectively verified at baseline using standard-of-care/best-of-care diagnostic analysis, and by clinical follow-up at 6-month follow-up. The different prediction curves in the graph depict the different biostatistical analysis algorithms used in the analysis in male subjects: grey closed circles depict Diagonal Discriminant Analysis; black closed squares depict Fisher's Discriminant Analysis; and black open circles depict Quadratic Discriminant Analysis. A combination of 14 to 40 RNA probes is able to predict ischemic heart disease in male patients with about 98% accuracy.

[0032] FIG. 7 shows a plot exemplifying percent accuracy (Accuracy %) to diagnose ischemic heart disease using the expression of various combinations of genes (for instance as detected by nucleotide biomarkers) in male subjects. The X-axis depict the number of genetic biomarkers in the diagnostic classifier. The Y-axis depict the accuracy of diagnosis for ischemic heart disease in a cohort of subjects with symptomatic chest pain (n=244). These subjects were referred by the general practitioner for further analysis of complaints suspect for ischemic heart disease (i.e. coronary artery disease; CAD disease) in the cardiology outpatient clinic. The correct diagnoses of these patients were prospectively and retrospectively verified at baseline using standard-of-care/best-of-care diagnostic analysis, and by clinical follow-up at 6-month follow-up. The different prediction curves in the graph depict the different biostatistical analysis algorithms used in the analysis of male subjects: grey closed circles depict Diagonal Discriminant Analysis; black closed squares depict Fisher's Discriminant Analysis; grey open circles depict Linear Discriminant Analysis; black open squares depicts partial Least Squares w subsequent logistic regression analysis; black closed circles depict Partial Least Squares analysis w subsequent Random Forest analysis; black open circles depict Quadratic Discriminant Analysis; and black diamonds depict Random Forrest Analysis. A combination of 14 to 22 nucleotide biomarkers (to indicate corresponding specific genes expression levels) is able to predict ischemic heart disease in male patients with about 93-96% accuracy.

[0033] FIG. 8 provides an illustrative framework for a clinical study for ischemic biomarker diagnostic methods.

[0034] FIG. 9 provides a thorough summary of sensitivity and specificity results of invasive tests currently used to diagnosis coronary artery disease.

[0035] FIG. 10 provides a study assessment schedule for the clinical study outlined in FIG. 11.

### DETAILED DESCRIPTION

[0036] Ischemia in cardiovascular patients is typically caused by a coronary artery stenosis and/or occlusion (due to progressive coronary atherosclerosis), leading to a local low oxygen (ischemic) condition in the heart, and may eventually result in myocardial damage and irreversible loss of cardiac contractile function. The narrowing of blood vessels is usually caused by atherosclerosis (fat deposition/inflammation in the vessel wall). However, the presence of atherosclerosis per se does not mean there is oxygen deprivation. Although ischemia accounts for the onset of heart disease, early ischemic conditions can be quiescent or transient, and therefore may escape detection by conventional diagnostic methods. Further, some available biomarkers are correlated with a greater chance to develop atherosclerosis, which may or may not lead to ischemia.

[0037] Described herein are methods, compositions, kits, and uses for detecting a condition or a likelihood of developing such condition comprising perfusion shortage, such as a condition comprising neoangiogenesis or ischemia, or a risk of such a condition. Without being limited by theory, it is contemplated that ischemia or neoangiogenesis can form the basis of the pathogenesis of some diseases (like ischemic heart or cerebrovascular disease) or determine the prognosis, therapy responsiveness or risk for other diseases). The present disclosure also describes a gender-specific or sex-based approach in detecting the condition or a likelihood of developing such condition comprising perfusion shortage or a risk thereof. In addition, the present disclosure presents methods for detecting conditions comprising ischemia or a risk thereof in a subject when the subject may not have developed any detectable tissue damages due to ischemic conditions.

[0038] Further, the present disclosure describes methods for identifying and measuring blood markers that are activated due to an oxygen stress response, which may be independent of atherosclerosis. In some aspects, hematopoietic endothelial precursor cells (EPCs) positive for Flk1+ (or its human orthologue, VEGFR2 or KDR) (for convenience, the cells may be referred to herein as “Flk1+ cells,” or “Flk1-positive cells”), and optionally at least one of Flt1, Flt4, KDR1, VEGFR1, VEGFR2, CD309, CXCR4, CD31, CD34, CD105, CD133, Sca-1, and c-Kit can exhibit different expression profiles of genes in subjects that are at risk for conditions comprising perfusion shortage (for example conditions comprising neoangiogenesis and/or ischemia). In some cases, the expression profiles of genes can be generated by measuring or detecting the genes' corresponding transcripts, splice variants, exon regions, or peptides. In some embodiments, the genes of interest are listed in Tables 1-6 attached as appendix herein.

[0039] Moreover, the method, composition, use, or kit (e.g., protocol, biomarkers, reference values, and/or algorithm) can be used for the identification of current and past ischemic events (irrespective of its location), or can be used for the selection of patients for more advanced diagnostic workup or initiation/cessation or modulation of specific therapy, for example to measure a response to the therapy (such as a “gate keeper” or “companion diagnostic” use, rather than a stand-alone diagnostic). The methods, compositions, uses, or kits of some embodiments are therefore able to (with sufficient accuracy) to exclude diseases comprising perfusion shortage (such as neoangiogenesis and/or ischemia) in subjects, as well as identify such diseases.

### Gender-Specific Approach in Detecting a Condition Comprising Perfusion Shortage or a Risk Thereof

[0040] Researches have shown that there are sex-related differences between women and men. These sex-related differences may include varying risk factor profiles, accuracy of diagnostic testing, clinical presentations, treatment practices, and outcomes. For example, women have been shown to present cardiovascular symptoms late, and some of these symptoms may not recognized by health care professionals. In oncology, sex-related differences also include incidence, outcome, and response to therapies after adjusting of known epidemic risk factors. Specifically, large differences in mutation density and frequency of mutation of specific oncogenes have been shown, such as 0-catenin and BAP1.

[0041] The present disclosure discloses a gender specific approach in detecting a condition comprising perfusion shortage or a risk thereof. In some cases, the methods for analyzing a biological sample comprises obtain the biological sample from the subject. When the subject is a female, a female targeted set of genes is identified and utilized. Further, a set of nucleotide sequences and peptide sequences encoded therefrom as disclosed in Table 3 in female subjects is also identified and utilized. Expression levels of at least two genes (or nucleotide or protein biomarkers) from the female targeted set of genes are measured or detected. Based on the signals detected or measured from the at least two genes (or nucleotide or protein biomarkers) from the female targeted set of genes, an output indicative of the female subject's having or at risk of having the condition comprising perfusion shortage may be generated and reported to a health care professional. In some cases, the methods further comprise obtaining a range of control expression levels of said female targeted set of genes (or nucleotide or protein biomarkers). Tables 1, 3, and 5 attached herein as appendix comprise the female targeted set of genes (including nucleotide sequences that can be used to detect gene expression levels or protein biomarkers that can be used to detect protein expression levels). Table 3 also lists a first plurality of nucleotide sequences that are identified to detect the expression levels of corresponding genes. The listed first plurality of nucleotide sequences are not meant to be limiting as other regions of genes can also be used to detect expression levels of genes. Further, Table 3 lists a send plurality of nucleotide sequences that can hybridize to the first plurality of nucleotide sequences. Additionally, Table 3 lists a third plurality of peptide sequences that are encoded by the first plurality of nucleotide sequences. Peptide sequences (e.g., antibodies (or protein ligands)) that may hybridize to the third plurality of peptide sequences may be used to detect expression levels of the corresponding genes (or protein expression levels). In some cases, the female targeted set of genes does not overlap with the male targeted set of genes. Moreover, Table 5 comprises a set of exon regions of genes in female subjects.

[0042] Further, when the subject is a male, a male targeted set of genes is identified and utilized. Further, a set of nucleotide sequences and peptide sequences encoded therefrom as disclosed in Table 4 in female subjects is also identified and utilized. Expression levels of at least two genes (or nucleotide or protein biomarkers) from the male targeted set of genes (or nucleotide or protein biomarkers) are measured or detected. Based on the signals detected or measured from the at least two genes (or nucleotide or protein biomarkers) from the male targeted set of genes, an output indicative of the male subject's having or at risk of having the condition comprising perfusion shortage may be generated and reported to a health care professional. In some cases, the methods further comprise obtaining a range of control expression levels of said male targeted set of genes (or nucleotide or protein biomarkers). Tables 2, 4, and 6 attached herein as appendix comprise the male targeted set of genes (including nucleotide sequences that can be used to identify genes and peptide sequences encoded therefrom). Table 4 also lists a first plurality of nucleotide sequences that are identified to detect the expression levels of corresponding genes. The listed first plurality of nucleotide sequences are not meant to be limiting as other regions of genes can also be used to detect expression levels of genes. Further, Table 4 lists a send plurality of nucleotide sequences that can hybridize to the first plurality of nucleotide sequences. Additionally, Table 4 lists a third plurality of peptide sequences that are encoded by the first plurality of nucleotide sequences. Peptide sequences (e.g., antibodies (or protein ligands)) that may hybridize to the third plurality of peptide sequences may be used to detect expression levels of the corresponding genes or proteins. Moreover, Table 6 comprises a set of exon regions of genes in male subjects.

[0043] In some cases, pilot data in murine and swine models of ischemia had shown that certain genes were indeed upregulated upon an ischemic myocardial event. Moreover, upregulated expression levels of other specific marker genes as disclosed herein has also been detected in circulating mononuclear cells in the blood of patients with myocardial ischemic events by use of qPCR analysis or any other suitable methods. The differentially expression levels of genes described herein (which have been observed to be differentially expressed in Flk1+ cells or fractions or secretions thereof in subjects suffering from hypoxemia), can comprise any nucleotide sequence, transcript, splice variant, and/or peptide identified by any of SEQ ID NOs: 1-5103, Genes Number 1-9280 (from Tables 1, 2, 5 & 6), or a peptide sequence encoded therefrom. Differential expression levels of these gene(s) as described herein can be indicative of a presence, risk, or severity of a condition comprising perfusion shortage (such as a condition comprising neoangiogenesis or ischemia). Without being limited by theory, the differentially expressed genes identified during hypoxemia as described herein (e.g., any nucleotide sequence, transcript, splice variant, and/or peptide identified by any of SEQ ID NOs: 1-5103, Genes Number 1-9280, or a peptide sequence encoded therefrom) may, in some embodiments, also represent a therapeutic target or lead to promote or regulate (the reactive hypoxemic) neoangiogenesis response and vascular modelling in disease. By enhancing, stabilizing, inhibiting, or ameliorating the gene expression levels of potential therapeutic target(s) or lead(s) or interfering with protein deliveries of potential therapeutic target(s) or lead(s), neoangiogenesis may be inhibited to treat diseases involving neoangiogenesis, for instance, not meant to be limiting, ophthalmic/retinal neoangiogenesis conditions. Also, tumor angiogenesis may be inhibited to slow down the growth a solid tumor and deteriorate tumor growth environment.

[0044] Further, in some case, a female targeted set of genes is listed in Tables 1, 3, and 5. In some cases, a male targeted set of genes is listed in Tables 2, 4, and 6. A control range of the expression levels of genes listed in Tables 1, 3, and 5 and listed in Tables 2, 4, and 6 are obtained from healthy subjects that do not have oxygen stress response due to ischemic conditions. In certain embodiments, when expression levels of the two or more genes from the female targeted genes are measure or detected outside of the control ranges in a female subject, an output or a report may be generated to indicate that the female subject might have or at risk of having a condition comprising perfusion shortage. Moreover, in certain embodiments, when expression levels of the two or more genes from the male targeted genes are measure or detected outside of the control ranges in a male subject, an output or a report may be generated to indicate that the male subject might have or at risk of having a condition comprising perfusion shortage.

[0045] In some embodiments, a method for detecting a condition comprising perfusion shortage (such as a condition comprising neoangiogenesis or ischemia), or risk thereof in a subject is described. The method can comprise detecting, in a biological sample of the subject, expression levels of at least two specified different genes (or nucleotide sequences or peptide biomarkers) listed in Tables 1, 3, and 5 for female subjects and Tables 2, 4, and 6 for male subjects. The method may further comprise detecting expression levels of exon regions as disclosed in Table 5 for female subjects and in Table 6 for male subjects. As disclosed herein, nucleotide and peptide sequences encoded therefrom listed in Tables 3 and 4 maybe used to measure expression levels of corresponding genes. The method can comprise receiving a set of control ranges of expression levels of the specified different gene products (as described herein, the control ranges can be determined experimentally, or received as a set of stored values, for example electronically or optically stored values). The method can comprise detecting the condition comprising neoangiogenesis or ischemia or a risk thereof when the expression levels of the specified different genes are outside of the control ranges. By way of example, the expression level of a DNA, RNA, splice variant, peptide, or a combination thereof of a gene from either a female or male targeted set of genes can be measured or detected. The method may comprise determining the copy number, level of expression, or level of activity of the at least two specified different genes (or nucleotide sequences or peptide biomarkers) in a biological sample from the subject. In some embodiments, the method comprises comparing the copy number, level of expression, or level of activity of the at least two specified different gene products with control ranges of copy number, level of expression, or level of activity, in which a significantly modulated copy number, level of expression, or level of activity of the target, relative to the control ranges, is an indication of neoangiogenesis or ischemia, or risk thereof in the subject. By way of example, expression levels of the genes can be determined to be outside of the control range using a statistical method selected from the group consisting of Fisher Discriminant analysis (FDA), Diagonal linear discriminant analysis (DLDA), Linear discriminant analysis (LDA), linear discriminant analysis based on partial least-squares (PLSLDA), partial least squares random Forest (PLSRF), orthogonal discriminant analysis (QDA), and Random Forest (RF), or a combination of any two of the listed methods. In some embodiments, the method is an in vitro method.

[0046] In some cases, the at least two specified different gene products correspond to two different genes selected from Tables 1-6. In some cases, the at least two specified different gene products comprise at least two different sequences in SEQ ID NOs: 1-5103, Genes Number 1-9280, or a peptide sequence encoded therefrom. The at least two different sequences may be any combination of different sequences or gene products among SEQ ID NOs: 1-5103, Genes Number 1-9280, or a peptide sequence encoded therefrom. For example, the method, composition, kit, or use of some embodiments can comprise measuring or detecting the expression levels of at least 2, 3, 4, 5, 6, 7, 8, 9, 10, 11, 12, 13, 14, 16, 17, 18, 19, 20, 21, 22, 23, 24, 25, 26, 27, 28 29, 30, 31, 32, 33, 34, 35, 36, 37, 38, 39, 40, 50, or genes from Tables 1-6, including ranges between any two of the listed values, for example, 2-14, 2-2-16, 2-17, 2-18, 2-19, 2-20, 2-40, 20-50, 20-60, 4-14, 4-15, 4-20, 4-25, 4-30, 4-35, 4-40, 4-50, 4-5-10, 5-14, 5-15, 5-16, 5-17, 5-18, 5-19, 5-20, 5-40, 5-50, 5-60, 6-14, 6-15, 6-20, 6-25, 6-30, 6-35, 6-40, 6-50, 6-60, 8-14, 8-15, 8-20, 8-25, 8-30, 8-35, 8-40, 8-50, 8-60, 9-10, 9-14, 9-15, 9-16, 9-20, 9-9-50, 9-60, 10-14, 10-15, 10-20, 10-25, 10-30, 10-35, 10-40, 10-50, or 10-60 genes from Tables 1-6. In some embodiments, for example, if the subject is male, the methods disclosed herein comprise assaying no more than 40 different genes, for example no more than 40, 39, 38, 37, 36, 35, 34, 33, 32, 31, 30, 29, 28, 27, 26, 25, 24, 23, 22, 21, 20, 19, 18, 17, 16, 15, 14, 13, 12, 11, 10, 9, 8, 6, 5, 4, 3 or 2 different genes (or nucleotide or protein biomarkers) from Tables 2, 4, and 6, for example 2-14, 2-15, 2-16, 2-17, 2-18, 2-19, 2-20, 2-40, 20-50, 20-60, 4-14, 4-15, 4-20, 4-25, 4-30, 4-35, 4-40, 5-10, 5-14, 5-16, 5-17, 5-18, 5-19, 5-20, 5-40, 5-50, 5-60, 6-14, 6-15, 6-20, 6-25, 6-30, 6-35, 6-40, 8-14, 8-8-20, 8-25, 8-30, 8-35, 8-40, 8-50, 8-60, 9-10, 9-14, 9-15, 9-16, 9-20, 9-40, 10-14, 10-15, 10-20, 10-30, 10-35, or 10-40 different genes (or nucleotide or protein biomarkers). In some embodiments, for example, if the subject is female, the methods disclosed herein comprise assaying no more than 40 different genes, for example no more than 60, 59, 58, 57, 56, 55, 54, 53, 52, 51, 50, 49, 48, 47, 46, 45, 44, 43, 42, 41, 40, 39, 38, 37, 36, 35, 34, 33, 32, 31, 30, 29, 28, 27, 26, 25, 24, 23, 22, 21, 20, 19, 18, 17, 16, 15, 14, 13, 12, 11, 10, 9, 8, 6, 5, 4, 3 or 2 different genes (or nucleotide or protein biomarkers) from Tables 1, 3, and 5, for example, 2-14, 2-15, 2-16, 2-17, 2-18, 2-19, 2-20, 2-40, 20-20-60, 4-14, 4-15, 4-20, 4-25, 4-30, 4-35, 4-40, 4-50, 4-60, 5-10, 5-14, 5-15, 5-16, 5-17, 5-18, 5-19, 5-20, 5-40, 5-50, 5-60, 6-14, 6-15, 6-20, 6-25, 6-30, 6-35, 6-40, 6-50, 6-60, 8-14, 8-15, 8-20, 8-25, 8-30, 8-35, 8-40, 8-50, 8-60, 9-10, 9-14, 9-15, 9-16, 9-20, 9-40, 9-50, 9-60, 10-14, 10-15, 10-20, 10-10-30, 10-35, 10-40, 10-50, or 10-60 different genes (or nucleotide or protein biomarkers).

[0047] In some embodiments, when the expression levels of the at least two different gene products are outside of the control ranges, the condition comprising perfusion shortage, or a risk thereof is detected. For example, if the expression levels of the at least two different genes (or nucleotide or protein biomarkers) exceed the control range, the condition or risk thereof may be detected. In some embodiments, the expression levels of the at least two different genes (or nucleotide or protein biomarkers) are outside of the control ranges, and the condition or a risk thereof is detected.

[0048] In the method of some embodiments, when the expression levels of about 4 to about 40, about 4 to about 60, about 6 to about 40, about 6 to about 60, about 8 to about 40, about 8 to about 60, about to about 40, or about 10 to about 60 specified different genes are outside of the control ranges, and the condition comprising perfusion shortage or a risk thereof is detected. In the method of some embodiments, when the expression levels of about 4 to about 30 specified different genes are outside of the control ranges, and the condition or a risk thereof is detected. In the method of some embodiments, when the expression levels of about 4 to about 20 specified different gene products are outside of the control ranges, and the condition or a risk thereof is detected. In the method of some embodiments, when the expression levels of about 6 to about 40 specified different gene products are outside of the control ranges, and the condition or a risk thereof is detected. In the method of some embodiments, when the expression levels of about 6 to about 30 specified different gene products are outside of the control ranges, and the condition or a risk thereof is detected. In the method of some embodiments, when the expression levels of about 6 to about 20 specified different gene products are outside of the control ranges, and the condition or a risk thereof is detected. In the method of some embodiments, when the expression levels of about 2 to about 30 specified different gene products are outside of the control ranges, and the condition or a risk thereof is detected. In the method of some embodiments, when the expression levels of about 5 to about 10 specified different gene products are outside of the control ranges, and the condition or a risk thereof is detected. In the method of some embodiments, when the expression levels of about 8 to about 14 specified different gene products are outside of the control ranges, and the condition or a risk thereof is detected. In the method of some embodiments, when the expression levels of about 10 to about 15 specified different gene products are outside of the control ranges, and the condition or a risk thereof is detected. In the method of some embodiments, the expression levels of fewer than 15 specified different genes are outside of the control ranges, and the condition or a risk thereof is detected. In the method of some embodiments, when the expression levels of about 15 to about 20 specified different gene products are outside of the control ranges, and the condition or a risk thereof is detected.

[0049] In some embodiments, when the subject is female, the method comprises detecting the condition comprising perfusion shortage or a risk thereof in the subject when the expression levels of at least two specified different genes (or nucleotide or protein biomarkers) that each comprise a sequence from SEQ ID NOs: 1-5103, Genes Number 1-9280, or a peptide sequence encoded therefrom are outside of the control ranges, for example 2-60 or 2-40 specified different genes, including subranges within the listed range, for example, about 2-14, 2-15, 2-16, 2-17, 2-18, 2-19, 2-20, 2-40, 20-20-60, 4-14, 4-15, 4-20, 4-25, 4-30, 4-35, 4-40, 4-50, 4-60, 5-10, 5-14, 5-15, 5-16, 5-17, 5-18, 5-19, 5-20, 5-40, 5-50, 5-60, 6-14, 6-15, 6-20, 6-25, 6-30, 6-35, 6-40, 6-50, 6-60, 8-14, 8-15, 8-20, 8-25, 8-30, 8-35, 8-40, 8-50, 8-60, 9-10, 9-14, 9-15, 9-16, 9-20, 9-40, 9-50, 9-60, 10-14, 10-15, 10-20, 10-10-30, 10-35, 10-40, 10-50, or 10-60 specified different genes that each comprise a sequence from Tables 1, 3, and 5 (or peptide sequence encoded therefrom). Other suitable nucleotide sequences or probes that can detect and measure the expression levels of genes listed in Tables 1, 3, and 5 may also be used to detect the condition or the likelihood of developing such condition comprising perfusion shortage in female subjects. Moreover, other suitable peptide sequences that can detect and measure the expression levels of genes listed in Tables 1, 3, and 5 may also be used to detect the condition or the likelihood of developing such condition comprising perfusion shortage in female subjects. When the subject is male, the method comprises detecting the condition comprising perfusion shortage or a risk thereof in the subject when the expression levels of at least two specified different genes that each comprise a sequence from SEQ ID NOs: 1-5103, Genes Number 1-9280, or a peptide sequence encoded therefrom are outside of the control ranges, for example 2-60 or 2-40 specified different genes, including subranges within the listed range, for example, about 2-14, 2-15, 2-16, 2-17, 2-18, 2-19, 2-2-40, 4-14, 4-15, 4-20, 4-25, 4-30, 4-35, 4-40, 5-10, 5-14, 5-15, 5-16, 5-17, 5-18, 5-19, 5-20, 5-40, 6-14, 6-15, 6-20, 6-25, 6-30, 6-35, 6-40, 8-14, 8-15, 8-20, 8-25, 8-30, 8-35, 8-40, 9-10, 9-14, 9-15, 9-16, 9-20, 9-40, 10-14, 10-15, 10-20, 10-25, 10-30, 10-35, or 10-40 specified different genes that each comprise a sequence from Tables 2, 4, and 6 (or peptide sequence encoded therefrom). Other suitable nucleotide sequences or probes that can detect and measure the expression levels of genes listed in Tables 2, 4, and 6 may also be used to detect the condition or the likelihood of developing such condition comprising perfusion shortage in male subjects. Moreover, other suitable peptide sequences that can detect and measure the expression levels of genes listed in Tables 2, 4, and 6 may also be used to detect the condition or the likelihood of developing such condition comprising perfusion shortage in male subjects. In some embodiments, the same numerical of genes is detected for male and female subjects.

[0050] In some embodiments, when the subject is female, the method comprises detecting the condition comprising perfusion shortage or a risk thereof in the subject when the expression levels of at least two specified different genes (or nucleotide or protein biomarkers) from Tales 1, 3, and 5 are outside of the control ranges, for example 2-60 specified different genes, including subranges within the listed range, for example, 2-14, 2-15, 2-16, 2-17, 2-18, 2-19, 2-20, 2-40, 20-50, 20-60, 4-14, 4-15, 4-20, 4-25, 4-30, 4-35, 4-40, 4-50, 4-60, 5-10, 5-14, 5-15, 5-16, 5-17, 5-18, 5-19, 5-20, 5-40, 5-50, 5-6-14, 6-15, 6-20, 6-25, 6-30, 6-35, 6-40, 6-50, 6-60, 8-14, 8-15, 8-20, 8-25, 8-30, 8-35, 8-40, 8-50, 8-60, 9-10, 9-14, 9-15, 9-16, 9-20, 9-40, 9-50, 9-60, 10-14, 10-15, 10-20, 10-25, 10-30, 10-35, 10-40, or 10-60 specified different genes (or nucleotide or protein biomarkers).

[0051] In some embodiments, when the subject is male, the method comprises detecting the condition or a risk thereof in the subject when the expression levels of at least two specified different genes (or nucleotide or protein biomarkers) from Tables 2, 4, and 6 are outside of the control ranges, for example at least 2 and less than 15, 14, 13, 12, 11, or 10 specified different genes (or nucleotide or protein biomarkers).

[0052] In some embodiments, when the subject is female, the method comprises detecting, from the biological sample, expression levels of only 2-40 specified different genes from Tables 1, 3, and 5, including subranges within the listed range, for example, about 2-14, 2-15, 2-16, 2-17, 2-18, 2-19, 2-2-40, 4-14, 4-15, 4-20, 4-25, 4-30, 4-35, 4-40, 5-10, 5-14, 5-15, 5-16, 5-17, 5-18, 5-19, 5-20, 5-40, 6-14, 6-15, 6-20, 6-25, 6-30, 6-35, 6-40, 8-14, 8-15, 8-20, 8-25, 8-30, 8-35, 8-40, 9-10, 9-14, 9-15, 9-16, 9-20, 9-40, 10-14, 10-15, 10-20, 10-25, 10-30, 10-35, or 10-40 specified different genes. When the subject is male, the method comprises detecting, from the biological sample, expression levels of only 2-40 specified different genes (or nucleotide or protein biomarkers) from Tables 2, 4, and 6, for example, only 2-14, 2-15, 2-16, 2-17, 2-18, 2-19, 2-20, 2-40, 4-14, 4-15, 4-20, 4-25, 4-30, 4-35, 4-40, 5-14, 5-15, 5-16, 5-17, 5-18, 5-19, 5-20, 5-40, 6-14, 6-15, 6-20, 6-25, 6-30, 6-35, 6-40, 8-14, 8-8-20, 8-25, 8-30, 8-35, 8-40, 9-10, 9-14, 9-15, 9-16, 9-20, 9-40, 10-14, 10-15, 10-20, 10-25, 10-30, or 10-40 specified different genes (or nucleotide or protein biomarkers). In some embodiments, the same numerical of gene products is detected for male and female subjects.

[0053] In some embodiments, when the subject is female, the method comprises detecting, from the sample, expression levels of only 2-14, 2-15, 2-16, 2-17, 2-18, 2-19, 2-20, 2-40, 4-14, 4-15, 4-20, 4-25, 4-30, 4-35, 4-40, 5-10, 5-14, 5-15, 5-16, 5-17, 5-18, 5-19, 5-20, 5-40, 6-14, 6-15, 6-20, 6-25, 6-30, 6-6-40, 8-14, 8-15, 8-20, 8-25, 8-30, 8-35, 8-40, 9-10, 9-14, 9-15, 9-16, 9-20, 9-40, 10-14, 10-15, 10-10-25, 10-30, 10-35, or 10-40 specified different genes (or nucleotide or protein biomarkers) from Tables 1, 3, and 5. In some embodiments, the same numerical of gene products is detected for male and female subjects. In some embodiments, when the subject is male, the method comprises detecting, from the sample, expression levels of only 2-14, 2-15, 2-16, 2-17, 2-18, 2-19, 2-20, 2-40, 4-14, 4-15, 4-20, 4-25, 4-30, 4-35, 4-40, 5-10, 5-14, 5-15, 5-16, 5-17, 5-18, 5-19, 5-20, 5-40, 6-14, 6-15, 6-20, 6-25, 6-6-35, 6-40, 8-14, 8-15, 8-20, 8-25, 8-30, 8-35, 8-40, 9-10, 9-14, 9-15, 9-16, 9-20, 9-40, 10-14, 10-10-20, 10-25, 10-30, 10-35, or 10-40 specified different genes (or nucleotide or protein biomarkers) from Tables 2, 4, and 6.

[0054] In some embodiments, receiving a set of control ranges of expression levels of the specified different gene products comprises receiving a set of electronically or optically stored values. For example, control ranges may be obtained from a reference, such as an electronic database in which control ranges are stored.

[0055] In some embodiments, receiving a set of control ranges of expression levels of the specified different gene products comprises detecting expression levels of the specified different gene products of isolated hematopoietic endothelial precursor cells (EPCs), which includes EPCs expressing surface marker Flk1, or EPCs expression other surface markers, such as Flt1, Flt4, CD31, CD34 and more, of a control individual who does not have the condition and does not have a risk thereof.

### Methods for Detecting a Condition Comprising Perfusion Shortage Using Hematopoietic Endothelial Precursor Cells (EPCs) Cells, Fractions or Secretions Thereof

[0056] Blood-based diagnostics are challenged by a high abundances of non-biomarker species, such as albumin, globulins, and blood group glycans, and relatively low abundances of biomolecules useful for disease and risk assessment. Many blood biomarkers correlate with the current health status of a patient, and provide minimal insight into the patient's propensity for developing a disease or condition. Furthermore, as blood biomolecules are derived from disparate cell and tissue types, direct blood analysis can be blind to risk factors for localized conditions.

[0057] The present disclosure provides a range of strategies which circumvent these challenges and enable biological state and disease predisposition diagnoses patient blood samples. While many blood biomarkers correlate weakly with perfusion shortage and related factors (e.g., neoangiogenesis or ischemia), the expression patterns of hematopoietic lineage endothelial precursor cells (EPCs), and in particular cases Flk1+EPCs, can be highly responsive to perfusion shortage risk and development. In some aspects, the present disclosure presents methods for analyzing a biological sample obtained from a subject. The methods comprise subjecting a plurality of hematopoietic lineage endothelial precursor cells (EPCs), fractions of said plurality of hematopoietic lineage EPCs, secretions of said plurality of hematopoietic lineage EPCs, or any combination thereof isolated from said biological sample, to a gene (nucleotide or protein) expression analysis, wherein said gene (nucleotide or protein) expression analysis comprises assaying expression levels of two or more genes (nucleotides or proteins) from a plurality of identified genes (nucleotides or proteins); and generating an output comprising said gene (nucleotide or protein) expression levels, wherein said gene (nucleotide or protein) expression levels are indicative of said subject's having or risk of having a condition comprising perfusion shortage at least in part based on said expression levels. Hematopoietic lineage EPCs or other vascular precursor cells that have the same characteristics are involved in the neoangiogenesis response. For example, hematopoietic lineage EPCs respond and react to low oxygen conditions such as low perfusion, hypoxemia, or ischemia, and play a role in new blood vessel formation at the site of low oxygen condition in order to correct such condition.

[0058] In some cases, hematopoietic EPCs may be Flk1+, meaning, the EPCs express FlK1 receptors on cell surface (maybe referred as Flk1+ cells). Flk1 may be referred to as “VEGFR2,”, “CD309”, “Kdr” and “Kdr1,” and these terms may be used interchangeably herein. In a biological sample of a certain organism, the relevant Flk1 orthologue for that organism is detected. For example, in a human biological sample (or for a human subject), “Flk1” or “Kdr1” or “VEGFR2” is understood to refer to the Homo sapiens orthologue of this gene. As used herein, “Flk1+ cell” or fractions or secretions thereof” (including variations of these root terms) has its ordinary and customary meaning as would be understood by one of ordinary skill in the art in view of this disclosure. The Flk1+ phenotype may identify endothelial precursor cells, and the shorthand “Flk1+ cell” refers to cells that are positive for Flk1. The Flk1+ cells may be further positive for markers selected from Flt1 (also referred to as VEGFR1), Flt4 (also referred to as VEGFR3), VEGFR1, CXCR4, CD31, CD34, CD105, CD133, Sca-1, and c-Kit. For example, the Flk1+ cell may be Flk1+, Flk1+Flt1+, Flk1+Flt4+, Flk1+Flt1+Flt4+, Flk1+Flt1+VEGFR1+, or Flk1+Flt1+VEGFR1+CXCR4+, or any combinations comprising the additional markers listed above.

[0059] In some cases, hematopoietic EPCs may express cell surface markers selected from Flt1, Flt4, KDR1, VEGFR1, VEGFR2, CD309, CXCR4, CD31, CD34, CD105, CD133, Sca-1, and c-Kit. The hematopoietic EPCs may not express Flk1. The hematopoietic EPCs may express cell surface markers, such as CD34, Flt4, CD105, and CD133. As disclosed herein, hematopoietic EPCs could be endothelial precursor cells that express any combinations of the cell surface markers disclosed herein.

[0060] As used herein, a “biological sample” refers to bodily fluids and/or tissues including blood, plasma, serum, stool, lymph, cerebrospinal fluid, saliva, sputum, tears, sweat, semen, transudate, urine, exudate, tissue biopsy, and synovial fluid. In some embodiments, the sample comprises, consists essentially of, or consists of Flk1+ cells, or gene products produced from Flk1+ cells (for example fractions of Flk1+ cells, and/or proteins secreted by Flk1+ cells). In some embodiments, the sample comprises, consists essentially of, or consists of hematopoietic EPCs that does not express Flk1 but express cell surface markers selected from Flt1, Flt4, KDR1, VEGFR1, CXCR4, CD31, CD34, CD105, CD133, Sca-1, and c-Kit, or gene products produced from these cells (for example fractions of these cells, and/or proteins secreted by these cells). In some embodiments, the sample comprises, consists essentially of, or consists of whole Flk1+ cells as described herein. In some embodiments, the sample comprises, consists essentially of, or consists of whole hematopoietic EPCs that does not express Flk1, but express cell surface markers selected from Flt1, Flt4, KDR1, VEGFR1, CXCR4, CD31, CD34, CD105, CD133, Sca-1, and c-Kit, as described herein. In some embodiments, the sample comprises, consists essentially of, or consists of isolated Flk1+ cells. For example, at least 5%, 10%, 20%, 30%, 40%, 50%, 60%, 70%, 80%, 85%, 90%, 95%, 97%, or 99% of the cells in the biological sample can be Flk1+ cells, including ranges between any two of the listed values, for example, 5%-80%, 5%-99%, 20%-80%, 20%-99%, 50%-80%, or 50%-99%. In some embodiments, the sample comprises, consists essentially of, or consists of isolated hematopoietic EPCs that does not express Flk1, but express cell surface markers selected from Flt1, Flt4, KDR1, VEGFR1, CXCR4, CD31, CD34, CD105, CD133, Sca-1, and c-Kit. In some embodiments, single cells of the biological sample are analyzed. In some embodiments, the sample comprises, consists essentially of, or consists of a sample of isolated Flk1+ cells, or a fraction or cellular secretion of these cells. In some embodiments, the sample comprises, consists essentially of, or consists of a sample of isolated hematopoietic EPCs that does not express Flk1 but express cell surface markers selected from Flt1, Flt4, KDR1, VEGFR1, CXCR4, CD31, CD34, CD105, CD133, Sca-1, and c-Kit, or a fraction or cellular secretion of these cells. For example, the expression level of a nucleic acid sequence or a peptide sequence encoded therefrom of one or more of SEQ ID NOs: 1-5103, Genes Number 1-9280, or a peptide sequence encoded therefrom in the cellular secretions or fractions may be measured or detected.

[0061] To avoid or minimize contamination with gene products of other cells, the hematopoietic EPCs disclosed herein may be obtained as whole cells. However, once these whole cells have been isolated, cellular secretions or fractions may be used. Accordingly, in some embodiments, a sample comprises a cellular secretion or fraction of, or isolated hematopoietic EPCs disclosed herein. In some embodiments, the sample comprises one or more Flk1+ cells. In some embodiments, the sample can comprise at least 10⁴, 10⁵, 10⁶, 10⁷, 10⁸, 10⁹ or more (including ranges between any two of the listed values, for example 10⁴-10⁶, 10⁴-10⁹, or 10⁶-10⁹) hematopoietic EPCs or fractions or secretions thereof. Samples comprising hematopoietic EPCs (or fractions or secretions thereof) may also comprise body fluids and/or tissues (including but not limited to blood, plasma, serum, stool, lymph, cerebrospinal fluid, saliva, sputum, tears, sweat, semen, transudate, exudate, tissue biopsies and synovial fluid). The body fluid and/or tissue may comprise one or more hematopoietic EPCs, or fractions or sections of one more hematopoietic EPCs.

[0062] As used herein “isolated” hematopoietic EPC has its ordinary and customary meaning as would be understood by one of ordinary skill in the art in view of this disclosure. It refers to hematopoietic EPCs in a composition that is enriched for this cell type. The hematopoietic EPCs may be present in concentrations relative to other cell types sufficient for detection of expression profiles of gene products described herein associated with conditions comprising ischemia or neoangiogenesis. In methods, compositions, kits, and uses of some embodiments, the biological samples comprise at least 20%, 30%, 40%, 50%, 60%, 70%, 80%, 90%, 95%, or 99% isolated hematopoietic EPCs, fractions, or secretions thereof compared to other cell types, including ranges between any two of the listed values such as 20-99%, 20-90%, 20-80%, 40-99%, 40-90%, 40-80%, 50%-99%, 50%-90%, 50%-80%, 70%-99%, 70%-90%, 70%-80%, 90%-99%, 90%-95% or 95%-99%. In some embodiments, the biological samples consist essentially of or consist of hematopoietic EPCs, fractions, or secretions thereof. In some embodiments, the biological samples comprise isolated whole mononuclear peripheral blood cells that consists essentially of the hematopoietic EPCs. In some embodiments, the isolated hematopoietic EPCs are in a biological sample that is free of other cell types. Hematopoietic EPCs may be isolated using any suitable technique, for example, flow cytometry for cells positive for Flk1, Flt1, Flt4, CD31, CD34, or any other cell surface markers disclosed herein and/or separation of cells using antibodies for Flk1, Flt1, Flt4, CD31, CD34, or any other cell surface markers disclosed herein, affixed to a solid phase (so that cells comprising Flk1, Flt1, Flt4, CD31, CD34, or any other cell surface markers disclosed herein can be bound to the solid phase, while other cells are washed away or discarded). By way of example, the solid phase may comprise beads such as magnetic beads. By way of example, isolation of cells such as hematopoietic EPCs with Flk1 marker is described in U.S. Pat. No. 6,852,533 B1, which is hereby incorporated by reference in its entirety. Flk1+ cells may be isolated from biological samples such as blood samples. Flk1+ cells may be isolated from tissue biopsy samples. Cells can be isolated using methods such as (but not limited to) flow cytometry/FACS, Dynabeads magnetic beads, based on surface markers that are specifically expressed in the cells of interest.

Detecting a Condition Comprising Perfusion Shortage or a Risk Thereof with a High Accuracy

[0063] In some aspects, the present disclosure presents methods for detecting conditions comprising perfusion shortage or a risk thereof with an accuracy level of above at least 91%. As used herein, “accuracy” refers to the percentage of results that are neither false positives nor false negatives. Accuracy may be represented mathematically as 100%−((type 1 error)+(type 2 error)). Type 1 error may also be referred to as “alpha error.” Type 2 error may also be referred to as “beta error.”

[0064] Conventionally, patients analyzed for chest pain reminiscent of angina pectoris are analyzed using a combination of ECG, standard blood work, exercise testing, myocardial contrast echocardiography (MCE), CT analysis (including calcium imaging, CT angiography and MSCT), or more advanced perfusion imaging (including scintigraphy or nuclear imaging (PET, PET/CT, MIBI, SPECT, or CZT-SPECT)) or CMR perfusion imaging which has yielded an adequate diagnosis in 74% of the cases. Even with advanced perfusion imaging, the adequate/accurate diagnosis of ischemic heart disease does not exceed 84% using these conventional approaches. In addition, setting up a multi-disciplinary analysis of these patients remains a logistical challenge (involving functional testing and imaging, involvement of the departments of cardiology, nuclear medicine, and radiology) and represents a laborious and costly diagnostic track (with disappointing accuracy). In addition, with these conventional approaches, the extent of ischemia, or the biological response to ischemia cannot be readily quantified (or expressed in AU) for use in monitoring of these patients for disease progression or therapy responsiveness.

[0065] The present disclosure shows measuring or detecting signals from multiple genes (protein or nucleotide biomarkers) in accordance with some embodiments can yield superior accuracy for detecting conditions comprising perfusion shortage or a risk thereof. Based on the organism studied, biological samples containing cells expressing relevant markers (as such, it will be appreciated that for a human subject, a “Flk1+” cell refers to a “VEGFR2+” or “CD309” cell, and that in a mouse, a “Flk1+ cell refers to a “Flk1+” cell) are obtained for further analysis. These expression profiles can offer accurate identification, prediction, and monitoring of conditions comprising perfusion shortage, having substantially lower misclassification scores than conventional approaches. However, not all cell types exhibit gene product expression profiles indicative of such conditions or risks thereof, and the presence of expression data from other cell types can cause noise that interferes with identification, prediction, and monitoring of conditions comprising perfusion shortage. Thus, in accordance with methods, compositions, kits, and uses of some embodiments, gene expression profiles can be detected in isolated hematopoietic EPCs disclosed herein or fractions or secretions thereof, so as to avoid noise that may be caused by detection of expression profiles in other cell populations. Furthermore, it is observed that superior classification of conditions comprising perfusion shortage (or risk of the same) can be obtained when the number of different gene products utilized is within a certain range. Accordingly, in some embodiments, a condition comprising perfusion shortage, or a risk of such a condition is detected by detecting the expression level of a specified number (for example, at least 2, 3, 4, 5, 6, 7, 8, 9, 10, 11, or 12, or 4-40, 4-60, 6-40, 6-60, 8-40, 8-60, 10-40, or 10-60) different gene products selected from Tables 1-6. The expression levels can be detected in isolated subject hematopoietic EPCs disclosed herein or fractions or secretions thereof of the subject.

[0066] In some embodiments, when the subject is female, the expression levels of less than 60, 55, 50, 45, 40, 35, 30, 25, 20, 15, 14, 13, 12, 10, 8, 6, 4 or 2 genes (nucleotide or protein biomarkers) from the plurality of genes listed in Tables 1, 3, and 5 are measured and detected. In some cases, when the subject is female, the expression levels of less than 60, 55, 50, 45, 40, 35, 30, 25, 20, 15, 14, 13, 12, 10, 8, 6, 4 or 2 genes (nucleotide or protein biomarkers) from the plurality of genes listed in Table 1 are measured and detected. In some cases, when the subject is female, the expression levels of less than 60, 55, 50, 45, 40, 35, 30, 25, 20, 15, 14, 13, 12, 10, 8, 6, 4 or 2 genes (nucleotide or protein biomarkers) from the plurality of genes are selected from the group consisting of ZNF807, LOC100130331, LOC100130872, LINC01502, FAM66A, SRGAP3-AS3, MIR1185-1, MIR1266, MIR1261, MIR4262, MTRNR2L10, MIR3928, LOC100507065, LOC100507642, MIR1273F, MIR4519, MIR4799, MIR4747, PTPRU, LOC100996660, DNAL4, XXYLT1-AS2, LOC101927230, LOC101927377, LOC101927479, LOC101927503, LINC01186, LOC101927735, LOC101927880, LINC01486, LOC101928775, RHOXF1P1, LOC101929108, LOC101929330, LOC101929696, CEACAM5, LAMTOR5, CELP, SLC27A4, RCC1, STMN2, CAPN11, FDX1L, MIR155HG, CSMD2, PNMA5, HSPA12B, CLN5, LRRC38, COL3A1, ARHGEF19, PROKR2, COX6C, PTRH1, KRTAP13-1, ASB9, CRYGC, VTI1A, BEST3, SLC22A31, ADIG, LINC01104, PYDC2, PRSS3P2, OTUD7A, DCC, RBM46, TCEANC, ADAMTS17, EFNA5, CELSR2, U2AF1L4, PIKFYVE, KCTD6, PTPLB, EMX1, OR9I1, JAZF1, LAMB4, FOXC2, NCOA6, MESDC2, FBXO28, DNMBP, U2SURP, ABCA6, CBX5, CBLC, KIF4A, C20orf166-AS1, NUDT8, NUP210P1, SMCO1, MAP7D2, ALX3, FAM133B, SUN2, HECTD1, WIPI2, SNORD53, GJA8, DHDH, GPR4, MRGPRG-AS1, LOC283731, LINC00304, ZNF763, IGHV1-58, LOC284933, RBMY1A3P, GPX5, MED4, C6orf15, GUCY1A2, GUCA2A, HUNK, TFAP2E, POTEA, LEUTX, OR2T3, IGFALS, C19orf45, FAM99A, IGFL3, OR2M1P, FAM90A25P, C8orf86, TMEM8C, PABPN1L, LIG4, FLJ26245, KRT16P2, PRSS57, LTBP3, MIR215, ARSF, MEF2C, IQSEC3, LOC441179, ZNRF2P1, MT1M, MTIF2, MYO7A, NDUFB9, ATP2B1, MIR422A, CEND1, LARS, UFM1, PDHA2, CES1P1, PLTP, LURAP1, MRPS21, MED1, PPP1R3C, RBM41, ASIC4, ZNF821, PPP1R9A, TRMU, UTP6, CCDC177, TBC1D24, GPR158, NYNRIN, BAI2, GBA3, PTPRO, RAC3, CDH26, RPLPO, BGN, FAM204A, PJA1, MT1IP, SHBG, LOC646513, SLA, SKOR2, SLC34A1, SNRPD1, SOX9, SP1, MIR532, TDG, TNNI3, DNLZ, LOC729739, CBA, VIPR2, USP7, DDX39B, ICE2, DCSTAMP, HIST1H4J, ZNF484, REG4, LRRIQ1, FAM126A, DOCK7, RNMT, ST3GAL5, GAL3ST3, SLC25A21, FATE1, UNC5A, TBX18, FIBP, DLGAP1, MGME1, SYCE1, HAND1, TNFRSF8, MAP4K4, GOSR1, SETDB1, SLC23A2, DOPEY2, TBX5-AS1, MIR216B, LOC100128364, LOC100130093, LINC01387, PSORS1C3, LOC100131372, UBE2DNL, LOC100133331, SNAR-I, NCAM1-AS1, WI2-237311.2, LOC100288866, MIR1289-2, MIR1976, MIR1250, MIR3115, MIR3907, MIR3944, CCDC179, CEBPZOS, LOC100505940, LOC100506125, LOC100506713, NA, MIR378D1, MIR4489, NA, PQBP1, USP12-AS2, ARHGEF38-IT1, LINC01314, LOC100996637, LOC101060400, LRPPRC, LOC101926941, LOC101927029, LOC101927419, LOC101927542, LOC101927585, LOC101927722, MRGPRF-AS1, LOC101928765, LOC101928850, LOC101929074, LOC101929239, LAMP5-AS1, LOC101929374, NA, ENOX2, ARFGEF2, PROKR1, AFG3L2, GLIPR1, TLK2, INSL6, KLK8, VPS45, ATG4A, MRGPRE, C10orf71, C10orf32, ZFP3, CHMP4B, FAM83C, AP1S3, TRIM71, ADORA1, C9orf85, MAGEC3, SAMD10, C11orf40, SERPINA12, TMED6, MGAT5B, ZNRF4, C1orf64, FAM71A, LINC00896, CYP2A7, CYP2E1, C9orf163, RIBC1, ANKFN1, ZNF579, GPR125, MIER3, DEFB4A, C10orf91, COX7B2, DLX5, DNASE1L2, B3GNT6, LCE4A, LINC00870, OR8J1, OPN5, SCUBE3, FGF6, FGF11, ATG14, FOXD4, MYO16, DDN, FLNB, EHBP1, SLC16A8, FUT3, MYADML2, HIST1H2BA, GABRB3, NATD1, FSCN2, DFNB31, MTHFD1L, ANKRD2, RGS17, CACNG4, ARHGEF16, GOLGA1, GPR6, HECTD4, LINC00523, OR4N4, FADS6, LINC00482, SLC9C2, IGHV1-2, GPR25, RPL34-AS1, TRBV30, LCN12, IGLV6-57, ALG6, LMCD1, TLX3, RAX, HCRT, HMMR, HOXA7, APOA1, LOC338667, C2orf70, LOC339807, ZSCAN22, GPR149, MPC1L, SLC6A18, LINC00265, IL13, AQP5, KCNC3, ARF6, KRT81, LCN15, CES1P2, KRT39, OR7A10, LINC01121, LOC401127, CD180, MAT1A, LOC440300, FLJ31662, NDUFS1, Sep-02, NEUROD1, NOTCH4, COL5A3, BOLA1, DESI2, GAL, CDC40, EIF3L, COMMD10, PGF, PKP1, CPXCR1, PRKAG3, FXYD7, POU3F3, NUTM2F, PCSK4, VPS13C, EPS8L1, PPL, CCDC40, RBM23, TMEM38B, RIC8B, ETNK2, DDX19A, ZNF280C, WDR11, C1orf106, EAPP, USE1, ECHDC1, PCDHA6, TEX13B, PROC, KLK6, TBX20, CD177, PSMD13, TTYH1, CLK4, LRTM1, ZNF512B, PTK6, ADGRB2, PTN, VAT1L, IGDCC4, PBOV1, NYX, RPL15, RPS6, RPS21, SCT, CCL19, NECAB3, WIPF3, TMEM168, FLJ38668, LOC644961, EBF2, ANHX, ST3GAL4, BRD9, ELOVL4, MIR591, TF, TP73, C5, UBE2V2, UMOD, MIR802, ZNF226, SLC30A3, HSD17B8, TUBAL3, IRAPPC13, TMEM62, ACAD10, THUMPD2, WBSCR16, PVRL4, TKTL1, INHBE, ATAD3B, CASP7, GFM2, KRTAP4-4, TTBK1, RNASE7, CCDC54, MYO18B, ZSCAN10, FIBCD1, ATG4C, RERG, TCAP, DENR, AKR7A2, CADPS, CBFB, MBTPS1, MYH13, PER2, GYG2, CDK5R2, HIST1H3F, PAPLN, BAZ1B, CTU1, BTAF1, PIAS2, CERS5, INA, SYNGR3, ACBD5, SLFN11, BMP15, LGI1, MEX3A, DMKN, TCEAL1, LHX2, PPT2, NCR2, MEDT, CABP1, ADAMTS1, NUP155, ADAMTSL2, FAM115A, ZBTB39, HNRNPDL, and DMTF1. In some cases, when the subject is female, the expression levels of two or more, three or more, four or more, five or more, six or more, seven or more, eight or more, nine or more, ten or more, twenty or more, thirty or more, forty or more, fifty or more, sixty or more, seventy or more, eighty or more, ninety or more, one hundred or more, two hundred or more genes, three hundred or more, four hundred or more, or five hundred or more (nucleotide or protein biomarkers) for the plurality of genes listed above are measured and detected.

[0067] In some cases, when the subject is female, the expression levels of less than 60, 55, 50, 45, 35, 30, 25, 20, 15, 14, 13, 12, 10, 8, 6, 4 or 2 genes (nucleotide or protein biomarkers) from the plurality of genes listed in Table 1 are measured and detected. In some cases, when the subject is female, the expression levels of less than 60, 55, 50, 45, 40, 35, 30, 25, 20, 15, 14, 13, 12, 10, 8, 6, 4 or 2 genes (nucleotide or protein biomarkers) from the plurality of genes are selected from the group consisting of ZNF807, LOC100130331, LOC100130872, LINC01502, FAM66A, SRGAP3-AS3, MIR1185-1, MIR1266, MIR1261, MIR4262, MTRNR2L10, MIR3928, LOC100507065, LOC100507642, MIR1273F, MIR4519, MIR4799, MIR4747, PTPRU, LOC100996660, DNAL4, XXYLT1-AS2, LOC101927230, LOC101927377, LOC101927479, LOC101927503, LINC01186, LOC101927735, LOC101927880, LINC01486, LOC101928775, RHOXF1P1, LOC101929108, LOC101929330, LOC101929696, CEACAM5, LAMTOR5, CELP, SLC27A4, RCC1, STMN2, CAPN11, FDX1L, MIR155HG, CSMD2, PNMA5, HSPA12B, CLN5, LRRC38, COL3A1, ARHGEF19, PROKR2, COX6C, PTRH1, KRTAP13-1, ASB9, CRYGC, VTI1A, BEST3, SLC22A31, ADIG, LINC01104, PYDC2, PRSS3P2, OTUD7A, DCC, RBM46, TCEANC, ADAMTS17, EFNA5, CELSR2, U2AF1L4, PIKFYVE, KCTD6, PTPLB, EMX1, OR9I1, JAZF1, LAMB4, FOXC2, NCOA6, MESDC2, FBXO28, DNMBP, U2SURP, ABCA6, CBX5, CBLC, KIF4A, C20orf166-AS1, NUDT8, NUP210P1, SMCO1, MAP7D2, ALX3, FAM133B, SUN2, HECTD1, WIPI2, SNORD53, GJA8, DHDH, GPR4, MRGPRG-AS1, LOC283731, LINC00304, ZNF763, IGHV1-58, LOC284933, RBMY1A3P, GPX5, MED4, C6orf15, GUCY1A2, GUCA2A, HUNK, TFAP2E, POTEA, LEUTX, OR2T3, IGFALS, C19orf45, FAM99A, IGFL3, OR2M1P, FAM90A25P, C8orf86, TMEM8C, PABPN1L, LIG4, FLJ26245, KRT16P2, PRSS57, LTBP3, MIR215, ARSF, MEF2C, IQSEC3, LOC441179, ZNRF2P1, MT1M, MTIF2, MYO7A, NDUFB9, ATP2B1, MIR422A, CEND1, LARS, UFM1, PDHA2, CES1P1, PLTP, LURAP1, MRPS21, MED1, PPP1R3C, RBM41, ASIC4, ZNF821, PPP1R9A, TRMU, UTP6, CCDC177, TBC1D24, GPR158, NYNRIN, BAI2, GBA3, PTPRO, RAC3, CDH26, RPLPO, BGN, FAM204A, PJA1, MT1IP, SHBG, LOC646513, SLA, SKOR2, SLC34A1, SNRPD1, SOX9, SP1, MIR532, TDG, TNNI3, DNLZ, LOC729739, CBA, VIPR2, USP7, DDX39B, ICE2, DCSTAMP, HIST1H4J, ZNF484, REG4, LRRIQ1, FAM126A, DOCK7, RNMT, ST3GAL5, GAL3ST3, SLC25A21, FATE1, UNC5A, TBX18, FIBP, DLGAP1, MGME1, SYCE1, HAND1, TNFRSF8, MAP4K4, GOSR1, SETDB1, SLC23A2, DOPEY2, and TBX5-AS1. In some cases, when the subject is female, the expression levels of two or more, three or more, four or more, five or more, six or more, seven or more, eight or more, nine or more, ten or more, twenty or more, thirty or more, forty or more, fifty or more, sixty or more, seventy or more, eighty or more, ninety or more, one hundred or more, or two hundred or more genes (nucleotide or protein biomarkers) for the plurality of genes listed above are measured and detected.

[0068] In some cases, when the subject is female, the expression levels of less than 60, 55, 50, 45, 35, 30, 25, 20, 15, 14, 13, 12, 10, 8, 6, 4 or 2 genes (nucleotide or protein biomarkers) detected using the plurality of probes and/or mRNA targets listed in Table 3 are measured and detected. The probes and/or mRNA target sequences are designed to measure and/or detect certain genes. In some cases, the plurality of exon regions of genes selected from Table 5 are selected from the group of genes in Table 19. In some cases, when the subject is female, the expression levels of less than 60, 55, 50, 40, 35, 30, 25, 20, 15, 14, 13, 12, 10, 8, 6, 4 or 2 exon regions (nucleotide or protein biomarkers) from the plurality of exon regions of genes listed in Table 5 are measured and detected. In some cases, the plurality of exon regions of genes selected from Table 5 are selected from the group of genes in Table 20. In some cases, the plurality of exon regions of genes selected from Table 5 comprise at least one of the genes selected from the group consisting of Gene Number 1554, Gene Number 1558 (ARHGEF16), Gene Number 1606 (SAMD13), Gene Number 1782 (ELK4), Gene Number 1785 (ESRRG), Gene Number 1788, Gene Number 1790 (HHIPL2), Gene Number 1792 (TRIM17), Gene Number 1822 (GHITM), and Gene Number 1837 (BTRC). In some cases, the plurality of exon regions of genes selected from Table 5 comprise at least two of the genes selected from the group consisting of Gene Number 1554, Gene Number 1558 (ARHGEF16), Gene Number 1606 (SAMD13), Gene Number 1782 (ELK4), Gene Number 1785 (ESRRG), Gene Number 1788, Gene Number 1790 (HHIPL2), Gene Number 1792 (TRIM17), Gene Number 1822 (GHITM), and Gene Number 1837 (BTRC). In some cases, the plurality of exon regions of genes selected from Table 5 comprise at least three of the genes selected from the group consisting of Gene Number 1554, Gene Number 1558 (ARHGEF16), Gene Number 1606 (SAMD13), Gene Number 1782 (ELK4), Gene Number 1785 (ESRRG), Gene Number 1788, Gene Number 1790 (HHIPL2), Gene Number 1792 (TRIM17), Gene Number 1822 (GHITM), and Gene Number 1837 (BTRC). In some cases, the plurality of exon regions of genes selected from Table 5 comprise at least four of the genes selected from the group consisting of Gene Number 1554, Gene Number 1558 (ARHGEF16), Gene Number 1606 (SAMD13), Gene Number 1782 (ELK4), Gene Number 1785 (ESRRG), Gene Number 1788, Gene Number 1790 (HHIPL2), Gene Number 1792 (TRIM17), Gene Number 1822 (GHITM), and Gene Number 1837 (BTRC). In some cases, the plurality of exon regions of genes selected from Table 5 comprise at least five of the genes selected from the group consisting of Gene Number 1554, Gene Number 1558 (ARHGEF16), Gene Number 1606 (SAMD13), Gene Number 1782 (ELK4), Gene Number 1785 (ESRRG), Gene Number 1788, Gene Number 1790 (HHIPL2), Gene Number 1792 (TRIM17), Gene Number 1822 (GHITM), and Gene Number 1837 (BTRC). In some cases, the plurality of exon regions of genes selected from Table 5 comprise at least six of the genes selected from the group consisting of Gene Number 1554, Gene Number 1558 (ARHGEF16), Gene Number 1606 (SAMD13), Gene Number 1782 (ELK4), Gene Number 1785 (ESRRG), Gene Number 1788, Gene Number 1790 (HHIPL2), Gene Number 1792 (TRIM17), Gene Number 1822 (GHITM), and Gene Number 1837 (BTRC). In some cases, the plurality of exon regions of genes selected from Table 5 comprise Gene Number 1554, Gene Number 1558 (ARHGEF16), Gene Number 1606 (SAMD13), Gene Number 1782 (ELK4), Gene Number 1785 (ESRRG), Gene Number 1788, Gene Number 1790 (HHIPL2), Gene Number 1792 (TRIM17), Gene Number 1822 (GHITM), and Gene Number 1837 (BTRC). In some cases, the plurality of exon regions of genes selected from Table 5 consists of Gene Number 1554, Gene Number 1558 (ARHGEF16), Gene Number 1606 (SAMD13), Gene Number 1782 (ELK4), Gene Number 1785 (ESRRG), Gene Number 1788, Gene Number 1790 (HHIPL2), Gene Number 1792 (TRIM17), Gene Number 1822 (GHITM), and Gene Number 1837 (BTRC).

[0069] In some cases, the plurality of exon regions of genes selected from Table 5 comprise at least one of the genes selected from the group consisting of Gene Number 1562 (CLCN6), Gene Number 1576 (EXTL1), Gene Number 1577 (ATPIF1), Gene Number 1580 (GJB3), Gene Number 1591, Gene Number 1606 (SAMD13), Gene Number 1626 (VPS45), Gene Number 1658 (KCTD3), Gene Number 1693 and (AIM1L). In some cases, the plurality of exon regions of genes selected from Table 5 comprise at least two of the genes selected from the group consisting of Gene Number 1562 (CLCN6), Gene Number 1576 (EXTL1), Gene Number 1577 (ATPIF1), Gene Number 1580 (GJB3), Gene Number 1591, Gene Number 1606 (SAMD13), Gene Number 1626 (VPS45), Gene Number 1658 (KCTD3), Gene Number and 1693 (AIM1L). In some cases, the plurality of exon regions of genes selected from Table 5 comprise at least three of the genes selected from the group consisting of Gene Number 1562 (CLCN6), Gene Number 1576 (EXTL1), Gene Number 1577 (ATPIF1), Gene Number 1580 (GJB3), Gene Number 1591, Gene Number 1606 (SAMD13), Gene Number 1626 (VPS45), Gene Number 1658 (KCTD3), and Gene Number 1693 (AIM1L). In some cases, the plurality of exon regions of genes selected from Table 5 comprise at least four of the genes selected from the group consisting of Gene Number 1562 (CLCN6), Gene Number 1576 (EXTL1), Gene Number 1577 (ATPIF1), Gene Number 1580 (GJB3), Gene Number 1591, Gene Number 1606 (SAMD13), Gene Number 1626 (VPS45), Gene Number 1658 (KCTD3), and Gene Number 1693 (AIM1L). In some cases, the plurality of exon regions of genes selected from Table 5 comprise at least five of the genes selected from the group consisting of Gene Number 1562 (CLCN6), Gene Number 1576 (EXTL1), Gene Number 1577 (ATPIF1), Gene Number 1580 (GJB3), Gene Number 1591, Gene Number 1606 (SAMD13), Gene Number 1626 (VPS45), Gene Number 1658 (KCTD3), and Gene Number 1693 (AIM1L). In some cases, the plurality of exon regions of genes selected from Table 5 comprise at least six of the genes selected from the group consisting of Gene Number 1562 (CLCN6), Gene Number 1576 (EXTL1), Gene Number 1577 (ATPIF1), Gene Number 1580 (GJB3), Gene Number 1591, Gene Number 1606 (SAMD13), Gene Number 1626 (VPS45), Gene Number 1658 (KCTD3), and Gene Number 1693 (AIM1L). In some cases, the plurality of exon regions of genes selected from Table 5 comprise Gene Number 1562 (CLCN6), Gene Number 1576 (EXTL1), Gene Number 1577 (ATPIF1), Gene Number 1580 (GJB3), Gene Number 1591, Gene Number 1606 (SAMD13), Gene Number 1626 (VPS45), Gene Number 1658 (KCTD3), and Gene Number 1693 (AIM1L). In some cases, the plurality of exon regions of genes selected from Table 5 consist of Gene Number 1562 (CLCN6), Gene Number 1576 (EXTL1), Gene Number 1577 (ATPIF1), Gene Number 1580 (GJB3), Gene Number 1591, Gene Number 1606 (SAMD13), Gene Number 1626 (VPS45), Gene Number 1658 (KCTD3), and Gene Number 1693 (AIM1L).

[0070] In some cases, the plurality of exon regions of genes selected from Table 5 comprise at least one gene selected from the group consisting of Gene Number 1553 (AGRN), Gene Number 1555, Gene Number 1565 (PDPN), Gene Number 1573 (C1orf213), Gene Number 1576 (EXTL1), Gene Number 1588 (KIF2C), Gene Number 1620 (MAN1A2), Gene Number 1636 (USP21), and Gene Number 1770. In some cases, the plurality of exon regions of genes selected from Table 5 comprise at least two genes selected from the group consisting of Gene Number 1553 (AGRN), Gene Number 1555, Gene Number 1565 (PDPN), Gene Number 1573 (C1orf213), Gene Number 1576 (EXTL1), Gene Number 1588 (KIF2C), Gene Number 1620 (MAN1A2), Gene Number 1636 (USP21), and Gene Number 1770. In some cases, the plurality of exon regions of genes selected from Table 5 comprise at least three genes selected from the group consisting of Gene Number 1553 (AGRN), Gene Number 1555, Gene Number 1565 (PDPN), Gene Number 1573 (C1orf213), Gene Number 1576 (EXTL1), Gene Number 1588 (KIF2C), Gene Number 1620 (MAN1A2), Gene Number 1636 (USP21), and Gene Number 1770. In some cases, the plurality of exon regions of genes selected from Table 5 comprise at least four genes selected from the group consisting of Gene Number 1553 (AGRN), Gene Number 1555, Gene Number 1565 (PDPN), Gene Number 1573 (C1orf213), Gene Number 1576 (EXTL1), Gene Number 1588 (KIF2C), Gene Number 1620 (MAN1A2), Gene Number 1636 (USP21), and Gene Number 1770. In some cases, the plurality of exon regions of genes selected from Table 5 comprise at least five genes selected from the group consisting of Gene Number 1553 (AGRN), Gene Number 1555, Gene Number 1565 (PDPN), Gene Number 1573 (C1orf213), Gene Number 1576 (EXTL1), Gene Number 1588 (KIF2C), Gene Number 1620 (MAN1A2), Gene Number 1636 (USP21), and Gene Number 1770. In some cases, the plurality of exon regions of genes selected from Table 5 comprise at least six genes selected from the group consisting of Gene Number 1553 (AGRN), Gene Number 1555, Gene Number 1565 (PDPN), Gene Number 1573 (C1orf213), Gene Number 1576 (EXTL1), Gene Number 1588 (KIF2C), Gene Number 1620 (MAN1A2), Gene Number 1636 (USP21), and Gene Number 1770. In some cases, the plurality of exon regions of genes selected from Table 5 comprise Gene Number 1553 (AGRN), Gene Number 1555, Gene Number 1565 (PDPN), Gene Number 1573 (C1orf213), Gene Number 1576 (EXTL1), Gene Number 1588 (KIF2C), Gene Number 1620 (MAN1A2), Gene Number 1636 (USP21), and Gene Number 1770. In some cases, the plurality of exon regions of genes selected from Table 5 consist of Gene Number 1553 (AGRN), Gene Number 1555, Gene Number 1565 (PDPN), Gene Number 1573 (C1orf213), Gene Number 1576 (EXTL1), Gene Number 1588 (KIF2C), Gene Number 1620 (MAN1A2), Gene Number 1636 (USP21), and Gene Number 1770.

[0071] In some cases, the plurality of exon regions of genes selected from Table 5 comprise at least one gene selected from the group consisting of Gene Number 1555, Gene Number 1562 (CLCN6), Gene Number 1566 (PRDM2), Gene Number 1616, Gene Number 1627 (SETDB1), Gene Number 1648 (CAMSAP2), Gene Number 2729 (ZNF765), Gene Number 2739 (GPR108), Gene Number 2764, Gene Number 2824 (C2orf15), Gene Number 2879 (SPEG), Gene Number 2890 (SEPT2), and Gene Number 2892. In some cases, the plurality of exon regions of genes selected from Table 5 comprise at least two genes selected from the group consisting of Gene Number 1555, Gene Number 1562 (CLCN6), Gene Number 1566 (PRDM2), Gene Number 1616, Gene Number 1627 (SETDB1), Gene Number 1648 (CAMSAP2), Gene Number 2729 (ZNF765), Gene Number 2739 (GPR108), Gene Number 2764, Gene Number 2824 (C2orf15), Gene Number 2879 (SPEG), Gene Number 2890 (SEPT2), and Gene Number 2892. In some cases, the plurality of exon regions of genes selected from Table 5 comprise at least three genes selected from the group consisting of Gene Number 1555, Gene Number 1562 (CLCN6), Gene Number 1566 (PRDM2), Gene Number 1616, Gene Number 1627 (SETDB1), Gene Number 1648 (CAMSAP2), Gene Number 2729 (ZNF765), Gene Number 2739 (GPR108), Gene Number 2764, Gene Number 2824 (C2orf15), Gene Number 2879 (SPEG), Gene Number 2890 (SEPT2), and Gene Number 2892. In some cases, the plurality of exon regions of genes selected from Table 5 comprise at least four genes selected from the group consisting of Gene Number 1555, Gene Number 1562 (CLCN6), Gene Number 1566 (PRDM2), Gene Number 1616, Gene Number 1627 (SETDB1), Gene Number 1648 (CAMSAP2), Gene Number 2729 (ZNF765), Gene Number 2739 (GPR108), Gene Number 2764, Gene Number 2824 (C2orf15), Gene Number 2879 (SPEG), Gene Number 2890 (SEPT2), and Gene Number 2892. In some cases, the plurality of exon regions of genes selected from Table 5 comprise at least five genes selected from the group consisting of Gene Number 1555, Gene Number 1562 (CLCN6), Gene Number 1566 (PRDM2), Gene Number 1616, Gene Number 1627 (SETDB1), Gene Number 1648 (CAMSAP2), Gene Number 2729 (ZNF765), Gene Number 2739 (GPR108), Gene Number 2764, Gene Number 2824 (C2orf15), Gene Number 2879 (SPEG), Gene Number 2890 (SEPT2), and Gene Number 2892. In some cases, the plurality of exon regions of genes selected from Table 5 comprise at least six genes selected from the group consisting of Gene Number 1555, Gene Number 1562 (CLCN6), Gene Number 1566 (PRDM2), Gene Number 1616, Gene Number 1627 (SETDB1), Gene Number 1648 (CAMSAP2), Gene Number 2729 (ZNF765), Gene Number 2739 (GPR108), Gene Number 2764, Gene Number 2824 (C2orf15), Gene Number 2879 (SPEG), Gene Number 2890 (SEPT2), and Gene Number 2892. In some cases, the plurality of exon regions of genes selected from Table 5 comprise Gene Number 1555, Gene Number 1562 (CLCN6), Gene Number 1566 (PRDM2), Gene Number 1616, Gene Number 1627 (SETDB1), Gene Number 1648 (CAMSAP2), Gene Number 2729 (ZNF765), Gene Number 2739 (GPR108), Gene Number 2764, Gene Number 2824 (C2orf15), Gene Number 2879 (SPEG), Gene Number 2890 (SEPT2), and Gene Number 2892. In some cases, the plurality of exon regions of genes selected from Table 5 consist of Gene Number 1555, Gene Number 1562 (CLCN6), Gene Number 1566 (PRDM2), Gene Number 1616, Gene Number 1627 (SETDB1), Gene Number 1648 (CAMSAP2), Gene Number 2729 (ZNF765), Gene Number 2739 (GPR108), Gene Number 2764, Gene Number 2824 (C2orf15), Gene Number 2879 (SPEG), Gene Number 2890 (SEPT2), and Gene Number 2892.

[0072] In some cases, the plurality of exon regions of genes selected from Table 5 comprise at least one gene selected from the group consisting of Gene Number 1573 (C1orf213), Gene Number 1636 (USP21), Gene Number 1639 (DDR2), Gene Number 1778 (LOC730227), Gene Number 2869 (NRP2), Gene Number 3666 (HLA-A), Gene Number 3689 (SYNGAP1), Gene Number 3694, Gene Number 3710 (HOXA-AS2), and Gene Number 3781 (NPC1L1). In some cases, the plurality of exon regions of genes selected from Table 5 comprise at least two genes selected from the group consisting of Gene Number 1573 (C1orf213), Gene Number 1636 (USP21), Gene Number 1639 (DDR2), Gene Number 1778 (LOC730227), Gene Number 2869 (NRP2), Gene Number 3666 (HLA-A), Gene Number 3689 (SYNGAP1), Gene Number 3694, Gene Number 3710 (HOXA-AS2), and Gene Number 3781 (NPC1L1). In some cases, the plurality of exon regions of genes selected from Table 5 comprise at least three genes selected from the group consisting of Gene Number 1573 (C1orf213), Gene Number 1636 (USP21), Gene Number 1639 (DDR2), Gene Number 1778 (LOC730227), Gene Number 2869 (NRP2), Gene Number 3666 (HLA-A), Gene Number 3689 (SYNGAP1), Gene Number 3694, Gene Number 3710 (HOXA-AS2), and Gene Number 3781 (NPC1L1). In some cases, the plurality of exon regions of genes selected from Table 5 comprise at least four genes selected from the group consisting of Gene Number 1573 (C1orf213), Gene Number 1636 (USP21), Gene Number 1639 (DDR2), Gene Number 1778 (LOC730227), Gene Number 2869 (NRP2), Gene Number 3666 (HLA-A), Gene Number 3689 (SYNGAP1), Gene Number 3694, Gene Number 3710 (HOXA-AS2), and Gene Number 3781 (NPC1L1). In some cases, the plurality of exon regions of genes selected from Table 5 comprise at least five genes selected from the group consisting of Gene Number 1573 (C1orf213), Gene Number 1636 (USP21), Gene Number 1639 (DDR2), Gene Number 1778 (LOC730227), Gene Number 2869 (NRP2), Gene Number 3666 (HLA-A), Gene Number 3689 (SYNGAP1), Gene Number 3694, Gene Number 3710 (HOXA-AS2), and Gene Number 3781 (NPC1L1). In some cases, the plurality of exon regions of genes selected from Table 5 comprise at least six genes selected from the group consisting of Gene Number 1573 (C1orf213), Gene Number 1636 (USP21), Gene Number 1639 (DDR2), Gene Number 1778 (LOC730227), Gene Number 2869 (NRP2), Gene Number 3666 (HLA-A), Gene Number 3689 (SYNGAP1), Gene Number 3694, Gene Number 3710 (HOXA-AS2), and Gene Number 3781 (NPC1L1). In some cases, the plurality of exon regions of genes selected from Table 5 comprise Gene Number 1573 (C1orf213), Gene Number 1636 (USP21), Gene Number 1639 (DDR2), Gene Number 1778 (LOC730227), Gene Number 2869 (NRP2), Gene Number 3666 (HLA-A), Gene Number 3689 (SYNGAP1), Gene Number 3694, Gene Number 3710 (HOXA-AS2), and Gene Number 3781 (NPC1L1). In some cases, the plurality of exon regions of genes selected from Table 5 consist of Gene Number 1573 (C1orf213), Gene Number 1636 (USP21), Gene Number 1639 (DDR2), Gene Number 1778 (LOC730227), Gene Number 2869 (NRP2), Gene Number 3666 (HLA-A), Gene Number 3689 (SYNGAP1), Gene Number 3694, Gene Number 3710 (HOXA-AS2), and Gene Number 3781 (NPC1L1).

[0073] Further, the expression levels may be compared to control ranges disclosed here to generate an output/report indicative of the subject's having or risk of having a condition comprising perfusion shortage with an accuracy greater than about 99%. In some embodiments, the accuracy is about 99.9%, 99.8%, 99.7%, 99.6%, 99.5%, 99.4%, 99.3%, 99.2%, 99.1%, 98.9%, 98.5%, 98%, 97.5%, 97%, 96.5%, 96%, 95.5%, 95%, 94.5%, 94%, 93.5%, 93%, 92.5%, 92%, or 91.5%.

TABLE 19

| Code | | |
|---|---|---|
| PSC | biomarker nucleotide seq probe | biomarker nucleotide seq target mRNA |
| 2102 | ATCAGAGGCAGTTAAGATCCAATGT | TAGTCTCCGTCAATTCTAGGTTACA |
| 8673 | AAGTATAGACGCCCCGTCTCTGCCT | TTCATATCTGCGGGGCAGAGACGGA |
| 11464 | CTTTATCCCATTTTCGACGTGCCCG | GAAATAGGGTAAAAGCTGCACGGGC |
| 16663 | CTGAGACTCCCAGTACGCGGATCGT | GACTCTGAGGGTCATGCGCCTAGCA |
| 21817 | ACTCTCTTGCCAGTCGAACCTCGTG | TGAGAGAACGGTCAGCTTGGAGCAC |
| 24286 | NA | NA |
| 25439 | CGTGTAAATCCCACCGTACCGGAGA | GCACATTTAGGGTGGCATGGCCTCT |
| 29371 | AGGCACACTCCCAAGTTCCGGTTCG | TCCGTGTGAGGGTTCAAGGCCAAGC |
| 30491 | AGGCCTGTCCCAACTCCATCGAGAG | TCCGGACAGGGTTGAGGTAGCTCTC |
| 31618 | AGTGCCTGTCCCTATCTCCAAACGG | TCACGGACAGGGATAGAGGTTTGCC |
| 32943 | CTGTTCTCGTCCCTCGGTGTAGGAC | GACAAGAGCAGGGAGCCACATCCTG |
| 33806 | TCCGGAATCCAGAAGATAACAGTCT | AGGCCTTAGGTCTTCTATTGTCAGA |
| 36050 | GTTACGGTTTCCAGTCAGATCCAGG | CAATGCCAAAGGTCAGTCTAGGTCC |
| 40648 | ACCATACTTCCACGACCGGTGTCGG | TGGTATGAAGGTGCTGGCCACAGCC |
| 44512 | CCGCCGTCGTCCAATTCCTGTGAAA | GGCGGCAGCAGGTTAAGGACACTTT |
| 48445 | GTATAATGACCCTTATTTACTCCAG | CATATTACTGGGAATAAATGAGGTC |
| 52624 | AGTCTACGGTCCCTCCTATTTCGTC | TCAGATGCCAGGGAGGATAAAGCAG |
| 53091 | CTACAACTCCCTCGTGTAAACACAA | GATGTTGAGGGAGCACATTTGTGTT |
| 53355 | ACGACTGTTCCCTCTTAGTGGTGTC | TGCTGACAAGGGAGAATCACCACAG |
| 59716 | ACGTCGGTGACCCTAAGTCGAAGGG | TGCAGCCACTGGGATTCAGCTTCCC |
| 62038 | ACAAGAGATCCTGACCCTCTTCGAC | TGTTCTCTAGGACTGGGAGAAGCTG |
| 65216 | AAAGACGTCTCCTTTGCCCTACCAA | TTTCTGCAGAGGAAACGGGATGGTT |
| 65253 | CTCAGGATCCTGGTAGACCCGAGAC | GAGTCCTAGGACCATCTGGGCTCTG |
| 66201 | GGGCTCTCTCCTTCACCAGTCGATT | CCCGAGAGAGGAAGTGGTCAGCTAA |
| 71233 | ATTCCGGTCCTGTCTCTCAAATTAC | TAAGGCCAGGACAGAGAGTTTAATG |
| 88970 | AGGTGCCACCAGTCCATGTACTACG | TCCACGGTGGTCAGGTACATGATGC |
| 89503 | GGAATAAACCACTAAACTCGGAGAC | CCTTATTTGGTGATTTGAGCCTCTG |
| 98630 | GAGGTGACAGTACCACCCGAGGACA | CTCCACTGTCATGGTGGGCTCCTGT |
| 112599 | GTTCTTTCTACCTACCCTTTTGAGG | CAAGAAAGATGGATGGGAAAACTCC |
| 121129 | CCGAGTTTCCGATATCTTTATGGTG | GGCTCAAAGGCTATAGAAATACCAC |
| 143577 | AACGGTGCACCGTGTCGGAAGGTTT | TTGCCACGTGGCACAGCCTTCCAAA |
| 149915 | AGGTCTTGGGAGTTCTTATTAGGGA | TCCAGAACCCTCAAGAATAATCCCT |
| 151536 | TTAGGACCGGGGTATCGGACTCCCT | AATCCTGGCCCCATAGCCTGAGGGA |
| 156137 | ATAAATAGGGCTAGAAACTTGTGGT | TATTTATCCCGATCTTTGAACACCA |
| 175079 | AAAACAGTGGCAGGTCTTAGTGACC | TTTTGTCACCGTCCAGAATCACTGG |
| 179722 | ATCCGACATGGACCGCGTCTCCGGA | TAGGCTGTACCTGGCGCAGAGGCCT |
| 196695 | ATTTTTGGTGGATGACCGATGGTAC | TAAAAACCACCTACTGGCTACCATG |
| 200539 | ACGTCAATTGGTCATAAACTCCAGA | TGCAGTTAACCAGTATTTGAGGTCT |
| 202647 | AAATTGTGGTTGAGTCGTTCTCTAG | TTTAACACCAACTCAGCAAGAGATC |
| 232609 | AGAGTCCCTAGGATCACAGACCATC | TCTCAGGGATCCTAGTGTCTGGTAG |
| 235679 | GACTTAGTAGAAGGTTTTCTAAAGA | CTGAATCATCTTCCAAAAGATTTCT |
| 239356 | AGCTCCAGAGGTTCACCCTGTTTGG | TCGAGGTCTCCAAGTGGGACAAACC |
| 239483 | ACAGGTGAAGGTCTTTTCTCGGCGG | TGTCCACTTCCAGAAAAGAGCCGCC |
| 241691 | CATGTATACGAGGTGGAATTGGAAC | GTACATATGCTCCACCTTAACCTTG |
| 243938 | TTGGTACTGAGGTAAACAGTCAGAC | AACCATGACTCCATTTGTCAGTCTG |
| 279663 | ATATAAAACGGTAGCGAGTGGGCTT | TATATTTTGCCATCGCTCACCCGAA |
| 433854 | TTACCGGAGAAGAGCTAAGACGTTG | AATGGCCTCTTCTCGATTCTGCAAC |
| 449476 | CTCCAAGAAGTTTGAGGCCCGTATT | GAGGTTCTTCAAACTCCGGGCATAA |
| 508151 | GTCAGGTATTACAACATCAATGCCT | CAGTCCATAATGTTGTAGTTACGGA |
| 617278 | ATAACGCCCACTACTACTGTCCGAG | TATTGCGGGTGATGATGACAGGCTC |
| 680209 | ATACTGACTAAGAACGGCAACTCTG | TATGACTGATTCTTGCCGTTGAGAC |
| 854711 | CTGGTTTTTACTGTCCCGTTTCGCT | GACCAAAAATGACAGGGCAAAGCGA |
| 1279720 | GTTATTATTTATTCCCACTGCCCGA | CAATAATAAATAAGGGTGACGGGCT |
| 1326871 | TTGTGTACCCTAGATCCCTGACAGT | AACACATGGGATCTAGGGACTGTCA |

TABLE 20

| Affymetrix | Transcript | | | | |
|---|---|---|---|---|---|
| Exon ID B | Cluster ID | SEQ Name | Strand | Strand Start | Strand Stop |
| 16650141 | 16650141 | — | — | — | — |
| 16650467 | 16650467 | — | — | — | — |
| 16650951 | 16650951 | — | — | — | — |
| 16650957 | 16650957 | — | — | — | — |
| 16651195 | 16651195 | — | — | — | — |
| 16651411 | 16651411 | — | — | — | — |
| 16651571 | 16651571 | — | — | — | — |
| 16651811 | 16651811 | — | — | — | — |
| 16651885 | 16651885 | — | — | — | — |
| 16652173 | 16652173 | — | — | — | — |
| 16653133 | 16653133 | — | — | — | — |
| 16653857 | 16653857 | — | — | — | — |
| 16654419 | 16654419 | — | — | — | — |
| 16654495 | 16654495 | — | — | — | — |
| 16655639 | 16655639 | — | — | — | — |
| 16656867 | 16656867 | — | — | — | — |
| 16656939 | 16656939 | — | — | — | — |
| 16657644 | 16657598 | chr1 | + | 990376.00 | 990400.00 |
| 16657765 | 16657764 | chr1 | + | 1363700.00 | 1364109.00 |
| 16657951 | 16657948 | chr1 | + | 1982386.00 | 1982410.00 |
| 16658183 | 16658159 | chr1 | + | 3397184.00 | 3397501.00 |
| 16659119 | 16659102 | chr1 | + | 11893647.00 | 11893671.00 |
| 16659462 | 16659459 | chr1 | + | 13910596.00 | 13910623.00 |
| 16659488 | 16659478 | chr1 | + | 14095565.00 | 14095589.00 |
| 16660661 | 16660654 | chr1 | + | 23697718.00 | 23697938.00 |
| 16661046 | 16661031 | chr1 | + | 26361797.00 | 26361821.00 |
| 16661535 | 16661533 | chr1 | + | 28562744.00 | 28562770.00 |
| 16662326 | 16662322 | chr1 | + | 35250766.00 | 35250799.00 |
| 16663974 | 16663958 | chr1 | + | 45223239.00 | 45223263.00 |
| 16664693 | 16664690 | chr1 | + | 52518107.00 | 52518332.00 |
| 16666650 | 16666640 | chr1 | + | 84791390.00 | 84791414.00 |
| 16667753 | 16667752 | chr1 | + | 101616117.00 | 101616433.00 |
| 16669265 | 16669255 | chr1 | + | 118008956.00 | 118009010.00 |
| 16670417 | 16670404 | chr1 | + | 150049779.00 | 150049803.00 |
| 16670661 | 16670632 | chr1 | + | 150933479.00 | 150933503.00 |
| 16672757 | 16672754 | chr1 | + | 161130244.00 | 161130268.00 |
| 16673093 | 16673075 | chr1 | + | 162740364.00 | 162740388.00 |
| 16675168 | 16675158 | chr1 | + | 186280181.00 | 186280231.00 |
| 16675682 | 16675673 | chr1 | + | 200811130.00 | 200811197.00 |
| 16677481 | 16677473 | chr1 | + | 215752419.00 | 215752443.00 |
| 16683833 | 16683817 | chr1 | − | 26663713.00 | 26663737.00 |
| 16697485 | 16697484 | chr1 | − | 195727752.00 | 195728362.00 |
| 16698228 | 16698226 | chr1 | − | 203270218.00 | 203270406.00 |
| 16698507 | 16698504 | chr1 | − | 205569009.00 | 205569033.00 |
| 16699306 | 16699290 | chr1 | − | 216896744.00 | 216896768.00 |
| 16699434 | 16699433 | chr1 | − | 220160865.00 | 220160943.00 |
| 16699580 | 16699574 | chr1 | − | 222700336.00 | 222700389.00 |
| 16700232 | 16700218 | chr1 | − | 228604260.00 | 228604398.00 |
| 16706718 | 16706712 | chr10 | + | 85902423.00 | 85902496.00 |
| 16708482 | 16708468 | chr10 | + | 103295201.00 | 103295225.00 |
| 16864956 | 16864946 | chr19 | + | 53928352.00 | 53928381.00 |
| 16867866 | 16867837 | chr19 | − | 6737283.00 | 6737307.00 |
| 16871804 | 16871800 | chr19 | − | 37996874.00 | 37996940.00 |
| 16883383 | 16883380 | chr2 | + | 99758755.00 | 99758852.00 |
| 16889881 | 16889879 | chr2 | + | 206546738.00 | 206546762.00 |
| 16891318 | 16891273 | chr2 | + | 220341679.00 | 220341703.00 |
| 16893475 | 16893449 | chr2 | + | 242283265.00 | 242283289.00 |
| 16894005 | 16894001 | chr2 | − | 3581378.00 | 3581429.00 |
| 17037682 | 17037670 | chr6_qbl_hap6 | + | 1205278.00 | 1205318.00 |
| 17041405 | 17041393 | chr6 ssto_hap7 | + | 4886478.00 | 4886502.00 |
| 17042074 | 17042060 | chr6_ssto_hap7 | − | 3080352.00 | 3080376.00 |
| 17044504 | 17044491 | chr7 | + | 27163662.00 | 27163824.00 |
| 17057318 | 17057305 | chr7 | − | 44571379.00 | 44571428.00 |

[0074] In some embodiments, when the subject is male, the expression levels of less than 40, 35, 30, 25, 20, or 15 genes (nucleotide or protein biomarker) from said plurality of genes (nucleotide or protein sequences) listed in Tables 2, 4, and 6 are measured and detected. Further, the expression levels are compared to control ranges disclosed here to generate an output/report indicative of the subject's having or risk of having a condition comprising perfusion shortage with an accuracy greater than about 98%. In some embodiments, when the subject is male, the expression levels of less than 40, 35, 30, 25, 20, or 15 genes (nucleotide or protein biomarker) from said plurality of genes (nucleotide or protein sequences) listed in Table 2 are measured and detected. In some cases, when the subject is male, the expression levels of less than 40, 35, 30, 25, 20, or 15 genes (nucleotide or protein biomarkers) selected from the group of genes consisting of SNORD115-37, SNORD115-24, SNORA11B, MIR876, COL4A2-AS2, LOC100130373, LOC100130548, LOC100131496, LINC00240, BCL2L11, MED16, ERVV-2, KRTAP21-3, LOC100289230, LOC100289283, MIR1275, MIR1912, MIR1302-7, MIR1231, MIR1238, MIR1179, MIR1908, MIR1237, MIR2116, CSN1S2BP, MIR3148, MIR4280, MIR3116-1, MIR3129, MIR4275, MIR4326, MIR4254, LINC00673, MIR3926-2, MIR3678, MIR548Z, MIR3657, MIR3935, LOC100505478, LINC01364, C16orf95, LINC00837, MIR3529, MIR4475, MIR4492, MIR4784, MIR4732, MIR4684, MIR4773-2, MIR4429, MIR4442, LINC00507, LOC100996345, CYYR1-AS1, LOC100996635, CDK4, LOC101927053, PDZRN3-AS1, MEOX2-AS1, LINC01186, NA, GBAT2, LINC01214, LOC101928101, LOC101928118, NA, LOC101928195, LOC101928385, ICONS 00029157, LOC101928668, LINC01450, NA, LOC101928823, LOC101928919, LINC01262, LOC101929031, LOC101929159, LOC101929468, LOC101929497, ZNF267, CHERP, IFI44, FUT9, RFPL2, IFI44L, MAPRE2, SLC27A5, CHD1, RABL2B, FSTL1, MRPL3, GLB1L3, GPR182, CHRM5, SMIM12, LRRC37B, SMYD4, TBCB, KLHDC3, RPL39L, CLTB, PRSS30P, PCP2, FITM2, SNTN, TMEM68, OTUD6A, CRP, DYNLL2, CRYGD, NA, TMC8, CSTB, SLC35F3, CCDC140, WDSUB1, SH3D19, TEX28, FEZF1-AS1, ESCO2, ZNF645, CYP51A1, DAB1, ZCCHC12, DNMT3A, DRP2, EGR2, ABCA2, CDY2B, SENP5, EVI2B, ALCAM, ABCD1, F12, FAH, OR5A2, CCDC89, FABP5P3, FGF4, FGF14, DIP2A, ATP11B, NUP210, EXOC6B, ARC, SASH1, GRIP1, SEC61G, SCRIB, POLA2, GABARAPL1, DEFB108B, DEFB113, FTH1P3, CDRT15L2, HEATR9, ALS2CL, ASPM, OR2F1, GATA2, PLA2G2D, GCNT1, AGO1, OR7A5, OR1J2, SNORA70, GNAI3, BCL9L, OTOGL, SLC46A3, EWSAT1, LINC00927, C16orf54, MAMSTR, MCHR1, LOC284825, IGHD2-21, IGHD2-15, EOGT, C8orf31, IGLV10-54, IGLV3-12, SNX24, ARHGAP35, SCG3, PYCR2, SLC39A3, H3F3B, ANXA5, CXXC1, CDR2L, HNF4A, HNRNPK, SNORD56B, KRTAP20-1, KRTAP20-2, LOC339166, ZFP69, LOC340074, KIAA1875, OR2T8, PAQR9, IFNGR1, IGFBP1, KRTAP10-10, IL13RA1, KCNA3, KCNA5, TPTE2P6, LHFPL3, KCNJ10, LINC00162, KCNS3, KRTAP5-1, CC2D2B, RPRML, LRRC14B, OR52N2, LAMA4, LIPE, LINC00200, LINC00668, ZNF880, LOC400756, ASB18, LRRD1, LDLRAD2, LYN, MIR127, MIR210, MIR181A1, MIR9-1, MIR98, MIR99B, MIR17HG, MAFG, MAS1, MAX, MLF1, SUGT1P1, RPS26P11, MY010, NDUFB9, NKX3-1, NOS1, NRGN, MIR375, DUOX2, RRP15, NMD3, KLHL5, RPL26L1, EGFL7, PCYT1A, CDC40, UFC1, ERGIC3, SF3B6, PFDN4, PIK3C2G, DDIT4, EGLN1, FAM20A, HEATR3, CEP72, THSD1, PSME2, MIR362, MIR494, MIR520C, MIR516B2, MIR502, MIR508, ERMN, RANBP10, SH3RF1, FBRSL1, RET, EXOC4, TGIF2, RPL3L, BCORL1, CCL5, SDCBP, RRAGC, XYLT2, ACOT6, POPDC3, LINC00535, CCT6P1, TSG1, NA, BLVRA, NARFL, CSMD1, SGSH, NDST4, NA, EFTUD1P1, SIPA1, SLC5A4, PCP4L1, SLC9A2, LYNX1, MIR539, CAPN15, SPAG1, SPRR3, SQLE, SRI, SCARNA2, SCARNA16, TACR1, SNORD66, SNORD84, SNORD91A, SNORD97, MIR552, MIR563, MIR591, TCF19, TNP1, MIR660, SDHAP3, LOC729224, FAHD2CP, SEC14L6, MEIS1-AS3, WNT9A, SNORD113-3, SNORD114-3, SNORD114-9, SNORD114-18, SNORD114-27, SNORD114-30, MIR758, MIR668, ZNF134, PPDPF, OR5H2, CERS4, OGFOD2, LIN28A, NEK11, DCAKD, GPR157, EFHC2, CXXC4, PBX4, CPTP, NPRL3, OR2B2, AKAP17A, PCDH11Y, FAM103A1, TRAPPC9, HYAL3, CASP5, TTTY11, RAB34, NACAP1, SPOP, ZMYND12, LLPH, C22orf23, GTPBP3, SUV420H2, HAT1, SHANK3, KIAA1755, DENR, NPFF, MARCO, JRKL, PAGE1, PABPC4, SYNGAP1, SGPL1, BUD31, HIST1H3F, SYT8, MAP7, ZFAND2A, RGN, VAPB, RCSD1, SLIT2, NCR2, PAGE4, RNF7, MTFR1, CD59, and ATP2C2. In some cases, when the subject is male, the expression levels of two or more, three or more, four or more, five or more, six or more, seven or more, eight or more, nine or more, ten or more, twenty or more, thirty or more, forty or more, fifty or more, sixty or more, seventy or more, eighty or more, ninety or more, one hundred or more, two hundred or more, or three hundred or more genes (nucleotide or protein biomarkers) for the plurality of genes listed above are measured and detected.

[0075] In some cases, when the subject is male, the expression levels of less than 40, 35, 30, 25, 20, or 15 genes (nucleotide or protein biomarkers) selected from the group of genes consisting of SNORD115-37, SNORD115-24, SNORA11B, MIR876, COL4A2-AS2, LOC100130373, LOC100130548, LOC100131496, LINC00240, BCL2L11, MED16, ERVV-2, KRTAP21-3, LOC100289230, LOC100289283, MIR1275, MIR1912, M1R1302-7, MIR1231, MIR1238, MIR1179, MIR1908, MIR1237, MIR2116, CSN1S2BP, MIR3148, MIR4280, MIR3116-1, MIR3129, MIR4275, MIR4326, MIR4254, LINC00673, MIR3926-2, MIR3678, MIR548Z, MIR3657, MIR3935, LOC100505478, LINC01364, C16orf95, LINC00837, MIR3529, MIR4475, MIR4492, MIR4784, MIR4732, MIR4684, MIR4773-2, MIR4429, MIR4442, LINC00507, LOC100996345, CYYR1-AS1, LOC100996635, CDK4, LOC101927053, PDZRN3-AS1, MEOX2-AS1, LINC01186, NA, GBAT2, LINC01214, LOC101928101, LOC101928118, NA, LOC101928195, LOC101928385, ICONS 00029157, LOC101928668, LINC01450, NA, LOC101928823, LOC101928919, LINC01262, LOC101929031, LOC101929159, LOC101929468, LOC101929497, ZNF267, CHERP, IFI44, FUT9, RFPL2, IFI44L, MAPRE2, SLC27A5, CHD1, RABL2B, FSTL1, MRPL3, GLB1L3, GPR182, CHRM5, SMIM12, LRRC37B, SMYD4, TBCB, KLHDC3, RPL39L, CLTB, PRSS30P, PCP2, FITM2, SNTN, TMEM68, OTUD6A, CRP, DYNLL2, CRYGD, NA, TMC8, CSTB, SLC35F3, CCDC140, WDSUB1, SH3D19, TEX28, FEZF1-AS1, ESCO2, ZNF645, CYP51A1, DAB1, ZCCHC12, DNMT3A, DRP2, EGR2, ABCA2, CDY2B, SENP5, EVI2B, ALCAM, ABCD1, F12, FAH, OR5A2, CCDC89, FABP5P3, FGF4, FGF14, DIP2A, ATP11B, NUP210, EXOC6B, ARC, SASH1, GRIP1, SEC61G, SCRIB, POLA2, GABARAPL1, DEFB108B, DEFB113, FTH1P3, CDRT15L2, HEATR9, ALS2CL, ASPM, OR2F1, GATA2, PLA2G2D, GCNT1, AGO1, OR7A5, OR1J2, SNORA70, GNAI3, BCL9L, OTOGL, SLC46A3, EWSAT1, LINC00927, C16orf54, MAMSTR, MCHR1, LOC284825, IGHD2-21, IGHD2-15, EOGT, C8orf31, IGLV10-54, IGLV3-12, SNX24, ARHGAP35, SCG3, PYCR2, SLC39A3, H3F3B, ANXA5, CXXC1, CDR2L, HNF4A, HNRNPK, SNORD56B, KRTAP20-1, KRTAP20-2, LOC339166, ZFP69, LOC340074, KIAA1875, OR2T8, PAQR9, IFNGR1, IGFBP1, KRTAP10-10, IL13RA1, KCNA3, KCNA5, TPTE2P6, LHFPL3, KCNJ10, LINC00162, KCNS3, KRTAP5-1, CC2D2B, RPRML, LRRC14B, OR52N2, LAMA4, LIPE, LINC00200, LINC00668, ZNF880, LOC400756, ASB18, LRRD1, LDLRAD2, LYN, MIR127, MIR210, MIR181A1, MIR9-1, MIR98, MIR99B, MIR17HG, MAFG, MAS1, MAX, MLF1, SUGT1P1, RPS26P11, MY010, NDUFB9, NKX3-1, NOS1, NRGN, MIR375, DUOX2, RRP15, NMD3, KLHL5, RPL26L1, EGFL7, PCYT1A, CDC40, UFC1, ERGIC3, SF3B6, PFDN4, PIK3C2G, DDIT4, EGLN1, FAM20A, HEATR3, CEP72, THSD1, PSME2, MIR362, MIR494, MIR520C, MIR516B2, MIR502, MIR508, ERMN, RANBP10, SH3RF1, FBRSL1, RET, EXOC4, TGIF2, RPL3L, BCORL1, CCL5, SDCBP, RRAGC, XYLT2, ACOT6, POPDC3, LINC00535, CCT6P1, TSG1, NA, BLVRA, NARFL, CSMD1, SGSH, NDST4, NA, EFTUD1P1, SIPA1, SLC5A4, PCP4L1, SLC9A2, LYNX1, MIR539, CAPN15, SPAG1, SPRR3, SQLE, SRI, SCARNA2, SCARNA16, TACR1, SNORD66, SNORD84, SNORD91A, SNORD97, MIR552, MIR563, MIR591, TCF19, TNP1, MIR660, SDHAP3, LOC729224, FAHD2CP, SEC14L6, MEIS1-AS3, WNT9A, SNORD113-3, SNORD114-3, SNORD114-9, SNORD114-18, SNORD114-27, SNORD114-30, MIR758, MIR668, ZNF134, PPDPF, OR5H2, CERS4, OGFOD2, LIN28A, NEK11, DCAKD, GPR157, EFHC2, CXXC4, PBX4, CPTP, NPRL3, OR2B2, AKAP17A, PCDH11Y, FAM103A1, TRAPPC9, HYAL3, CASP5, TTTY11, RAB34, NACAP1, SPOP, ZMYND12, LLPH, C22orf23, GTPBP3, SUV420H2, HAT1, SHANK3, KIAA1755, DENR, NPFF, MARCO, JRKL, PAGE1, PABPC4, SYNGAP1, SGPL1, BUD31, HIST1H3F, SYT8, MAP7, ZFAND2A, RGN, VAPB, RCSD1, SLIT2, NCR2, PAGE4, RNF7, MTFR1, CD59, ATP2C2, ZBTB11-AS1, SNORD115-2, MIR942, MIR708, NFYC-AS1, MIR181A1HG, LOC100133669, FAR2P2, MIR513C, MIR1468, MIR1538, MIR1301, MIR1197, MIR3125, FAM212B-AS1, LOC100506371, LOC100506730, LOC100507419, LOC100507507, MIR4686, MIR378D1, MIR3689F, MIR4756, MIR4499, MIR550A3, MIR4425, MIR4691, HTT-AS, CERS6-AS1, RNU6-81P, FGF14-AS1, SLC9A9-AS1, DHRS9, LOC101927314, LOC101927483, LINC01280, LINC01488, LOC101928399, LOC101928509, LOC101928579, LOC101928668, LOC101928880, LOC101929236, LOC101929284, LOC101929432, LOC101929636, PSMD14, GPA33, CDO1, RGS14, GMEB1, MAPRE2, C9orf9, RABL2A, BIRC8, KLHL2, GPN1, CKM, RAB3C, OR52M1, CLK3, JDP2, SNX20, SHE, DMBX1, EDARADD, C20orf144, COMP, GLYCTK, UBLCP1, APOOL, RNF113B, CST1, CREB3L4, CTSL, NCBP2-AS2, MGC32805, CRYGN, TMEM30B, HBEGF, DUSPS, DVL2, E4F1, FLJ23867, ZNF385C, EPS8, EVPL, EXTL1, EZH2, FOXK1, DKFZP58611420, DIP2C, ATG2A, WDR43, SCFD1, SIN3B, FMR1, USP22, SZT2, CRTC1, MED13L, DEFB110, PROSER2, C19orf26, GEMIN5, SYF2, RWDD3, GARS, INTS1, GBP2, MYEOV, SNORD14A, B3GAT1, ZNF330, PCDH11XGP9, LOC284009, C17orf89, EMC10, WDR62, OR2V2, HOOK2, RPA4, GYPE, HBA2, HBB, HELLS, FOXA2, HNRNPF, HPN, HPRT1, ERAS, HSD17B1, NRBP2, IDI1, FIGLA, RTN4RL2, AQP1, NANOGNB, PDX1, C9orf50, SLC27A1, TRIM74, KIR2DL3, KRTAP12-3, C10orf99, MFSD2B, DKFZp667F0711, SOHLH1, MIR188, MIR26B, MIR296, MAN2A2, MGST3, MLH1, LOC440910, SMIM4, MYBPH, NASP, NDUFA1, NDUFS1, NFIL3, RNASE12, MIR380, OXTR, TXNDC11, RPS27L, SBDS, POMP, UBE2J1, CWC15, ATP6V1H, RBMX2, SERPINB8, TLR9, FAM193B, NUTM2F, DNAJC25, EPN3, KANSL3, VIMP, ZC3H15, EIF2AK2, PSMA2, PSMA4, MIR412, PRR12, ZNF492, SQRDL, RPL28, MIR487A, RPS6KA3, SCN4B, FAM204A, IRF2BPL, ZNF862, GZF 1, ATG3, GGT8P, EBF2, SI, SKI, FOXD4L6, SPAG11A, SLN, MIR376A2, FOXL2, TCF3, MIR550A2, DNAJC7, LOC727710, MRS2P2, LOC729739, TMEM258, NELFA, ZNF41, SNORD113-5, SNORD113-8, MIR769, MIR766, CLMP, GGNBP2, BRD3, SSPN, TUBB1, COIL, SF3A2, NRIP1, PARP9, HSDL2, EIF1AD, BRMS1L, SYVN1, TUBB6, USMGS, POMGNT2, MA STL, MIR22HG, IFITM1, KIAA1656, LRRCC1, KRT38, SUCLA2, DPM1, CDC123, DDX18, CHRNA6, KLHL6, BRSK2, ZNF622, PAGE5, PDLIM1, BTF3L4, DYRK1B, RAB11B, GRAP2, MUC16, CGB8, MED21, EP STI1, CYTIP, NCOR2, and TMEM63A.

[0076] In some embodiments, when the subject is male, the expression levels of less than 40, 35, 30, 20, or 15 genes (nucleotide or protein biomarker) detected using the plurality of probes and/or mRNA targets listed in Table 4 are measured and detected. In some cases, the plurality of genes detected using probes and/or mRNA targets selected from Table 4 are selected from the group of genes in Table 21. In some embodiments, when the subject is male, the expression levels of less than 40, 35, 25, 20, or 15 genes (nucleotide or protein biomarker) from said plurality of exon regions of genes (nucleotide or protein sequences) listed in Table 6 are measured and detected. In some cases, the plurality of exon regions of genes selected from Table 6 are selected from the group of genes in Table 22.

[0077] In some cases, the plurality of exon regions of genes selected from Table 6 comprise at least one gene selected from the group consisting of Gene Number 4155 (PLCH2), Gene Number 4166 (VPS13D), Gene Number 4167 (PDPN), Gene Number 4169 (DNAJC16), Gene Number 4181 (LDLRAP1), Gene Number 4184 (RPS6KA1), Gene Number 4203 (MFSD2A), Gene Number 4241, Gene Number 4462 (ZMYND12), Gene Number 4562 (TNFSF18), Gene Number 5518, Gene Number 5726 (LMBR1L). In some cases, the plurality of exon regions of genes selected from Table 6 comprise at least two genes selected from the group consisting of Gene Number 4155 (PLCH2), Gene Number 4166 (VPS13D), Gene Number 4167 (PDPN), Gene Number 4169 (DNAJC16), Gene Number 4181 (LDLRAP1), Gene Number 4184 (RPS6KA1), Gene Number 4203 (MFSD2A), Gene Number 4241, Gene Number 4462 (ZMYND12), Gene Number 4562 (TNFSF18), Gene Number 5518, Gene Number 5726 (LMBR1L). In some cases, the plurality of exon regions of genes selected from Table 6 comprise at least three genes selected from the group consisting of Gene Number 4155 (PLCH2), Gene Number 4166 (VPS13D), Gene Number 4167 (PDPN), Gene Number 4169 (DNAJC16), Gene Number 4181 (LDLRAP1), Gene Number 4184 (RPS6KA1), Gene Number 4203 (MFSD2A), Gene Number 4241, Gene Number 4462 (ZMYND12), Gene Number 4562 (TNFSF18), Gene Number 5518, Gene Number 5726 (LMBR1L). In some cases, the plurality of exon regions of genes selected from Table 6 comprise at least four genes selected from the group consisting of Gene Number 4155 (PLCH2), Gene Number 4166 (VPS13D), Gene Number 4167 (PDPN), Gene Number 4169 (DNAJC16), Gene Number 4181 (LDLRAP1), Gene Number 4184 (RPS6KA1), Gene Number 4203 (MFSD2A), Gene Number 4241, Gene Number 4462 (ZMYND12), Gene Number 4562 (TNFSF18), Gene Number 5518, Gene Number 5726 (LMBR1L). In some cases, the plurality of exon regions of genes selected from Table 6 comprise at least five genes selected from the group consisting of Gene Number 4155 (PLCH2), Gene Number 4166 (VPS13D), Gene Number 4167 (PDPN), Gene Number 4169 (DNAJC16), Gene Number 4181 (LDLRAP1), Gene Number 4184 (RPS6KA1), Gene Number 4203 (MFSD2A), Gene Number 4241, Gene Number 4462 (ZMYND12), Gene Number 4562 (TNFSF18), Gene Number 5518, Gene Number 5726 (LMBR1L). In some cases, the plurality of exon regions of genes selected from Table 6 comprise at least six genes selected from the group consisting of Gene Number 4155 (PLCH2), Gene Number 4166 (VPS13D), Gene Number 4167 (PDPN), Gene Number 4169 (DNAJC16), Gene Number 4181 (LDLRAP1), Gene Number 4184 (RPS6KA1), Gene Number 4203 (MFSD2A), Gene Number 4241, Gene Number 4462 (ZMYND12), Gene Number 4562 (TNFSF18), Gene Number 5518, Gene Number 5726 (LMBR1L). In some cases, the plurality of exon regions of genes selected from Table 6 comprise Gene Number 4155 (PLCH2), Gene Number 4166 (VPS13D), Gene Number 4167 (PDPN), Gene Number 4169 (DNAJC16), Gene Number 4181 (LDLRAP1), Gene Number 4184 (RPS6KA1), Gene Number 4203 (MFSD2A), Gene Number 4241, Gene Number 4462 (ZMYND12), Gene Number 4562 (TNFSF18), Gene Number 5518, Gene Number 5726 (LMBR1L). In some cases, the plurality of exon regions of genes selected from Table 6 consist of Gene Number 4155 (PLCH2), Gene Number 4166 (VPS13D), Gene Number 4167 (PDPN), Gene Number 4169 (DNAJC16), Gene Number 4181 (LDLRAP1), Gene Number 4184 (RPS6KA1), Gene Number 4203 (MFSD2A), Gene Number 4241, Gene Number 4462 (ZMYND12), Gene Number 4562 (TNFSF18), Gene Number 5518, Gene Number 5726 (LMBR1L).

[0078] In some cases, the plurality of exon regions of genes selected from Table 6 comprise at least one gene selected from the group consisting of Gene Number 4151 (LOC284628), Gene Number 4216 (DMAP1), Gene Number 4258 (LOC100996635), Gene Number 4444, Gene Number 5586, Gene Number 5590 (TRMTS), Gene Number 5879 (IRX6), Gene Number 6181 (FBXL20), Gene Number 6214 (MEP1B), Gene Number 6810, Gene Number 7536 (FGFR3), and Gene Number 8887 (DNAJC25). In some cases, the plurality of genes of exon regions selected from Table 6 comprise at least two genes selected from the group consisting of Gene Number 4151 (LOC284628), Gene Number 4216 (DMAP1), Gene Number 4258 (LOC100996635), Gene Number 4444, Gene Number 5586, Gene Number 5590 (TRMTS), Gene Number 5879 (IRX6), Gene Number 6181 (FBXL20), Gene Number 6214 (MEP1B), Gene Number 6810, Gene Number 7536 (FGFR3), and Gene Number 8887 (DNAJC25). In some cases, the plurality of exon regions of genes selected from Table 6 comprise at least three genes selected from the group consisting of Gene Number 4151 (LOC284628), Gene Number 4216 (DMAP1), Gene Number 4258 (LOC100996635), Gene Number 4444, Gene Number 5586, Gene Number 5590 (TRMTS), Gene Number 5879 (IRX6), Gene Number 6181 (FBXL20), Gene Number 6214 (MEP1B), Gene Number 6810, Gene Number 7536 (FGFR3), and Gene Number 8887 (DNAJC25). In some cases, the plurality of exon regions of genes selected from Table 6 comprise at least four genes selected from the group consisting of Gene Number 4151 (LOC284628), Gene Number 4216 (DMAP1), Gene Number 4258 (LOC100996635), Gene Number 4444, Gene Number 5586, Gene Number 5590 (TRMTS), Gene Number 5879 (IRX6), Gene Number 6181 (FBXL20), Gene Number 6214 (MEP1B), Gene Number 6810, Gene Number 7536 (FGFR3), and Gene Number 8887 (DNAJC25). In some cases, the plurality of exon regions of genes selected from Table 6 comprise at least five genes selected from the group consisting of Gene Number 4151 (LOC284628), Gene Number 4216 (DMAP1), Gene Number 4258 (LOC100996635), Gene Number 4444, Gene Number 5586, Gene Number 5590 (TRMTS), Gene Number 5879 (IRX6), Gene Number 6181 (FBXL20), Gene Number 6214 (MEP1B), Gene Number 6810, Gene Number 7536 (FGFR3), and Gene Number 8887 (DNAJC25). In some cases, the plurality of exon regions of genes selected from Table 6 comprise at least six genes selected from the group consisting of Gene Number 4151 (LOC284628), Gene Number 4216 (DMAP1), Gene Number 4258 (LOC100996635), Gene Number 4444, Gene Number 5586, Gene Number 5590 (TRMTS), Gene Number 5879 (IRX6), Gene Number 6181 (FBXL20), Gene Number 6214 (MEP1B), Gene Number 6810, Gene Number 7536 (FGFR3), and Gene Number 8887 (DNAJC25). In some cases, the plurality of exon regions of genes selected from Table 6 comprise Gene Number 4151 (LOC284628), Gene Number 4216 (DMAP1), Gene Number 4258 (LOC100996635), Gene Number 4444, Gene Number 5586, Gene Number 5590 (TRMTS), Gene Number 5879 (IRX6), Gene Number 6181 (FBXL20), Gene Number 6214 (MEP1B), Gene Number 6810, Gene Number 7536 (FGFR3), and Gene Number 8887 (DNAJC25). In some cases, the plurality of exon regions of genes selected from Table 6 consist of Gene Number 4151 (LOC284628), Gene Number 4216 (DMAP1), Gene Number 4258 (LOC100996635), Gene Number 4444, Gene Number 5586, Gene Number 5590 (TRMTS), Gene Number 5879 (IRX6), Gene Number 6181 (FBXL20), Gene Number 6214 (MEP1B), Gene Number 6810, Gene Number 7536 (FGFR3), and Gene Number 8887 (DNAJC25).

[0079] In some cases, the plurality of exon regions of genes selected from Table 6 comprise at least one gene selected from the group consisting of Gene Number 4164 (TMEM201), Gene Number 4166 (VPS13D), Gene Number 4337 (IPO9), Gene Number 4344 (LAX1), Gene Number 4350 (MFSD4), Gene Number 4356 (DTL), Gene Number 4578 (MIR181A1HG), Gene Number 4709 (GBF1), Gene Number 5478 (PNN), Gene Number 5518, and Gene Number 7345 (OTTHUMG00000162679). In some cases, the plurality of exon regions of genes selected from Table 6 comprise at least two genes selected from the group consisting of Gene Number 4164 (TMEM201), Gene Number 4166 (VPS13D), Gene Number 4337 (IPO9), Gene Number 4344 (LAX1), Gene Number 4350 (MFSD4), Gene Number 4356 (DTL), Gene Number 4578 (MIR181A1HG), Gene Number 4709 (GBF1), Gene Number 5478 (PNN), Gene Number 5518, and Gene Number 7345 (OTTHUMG00000162679). In some cases, the plurality of exon regions of genes selected from Table 6 comprise at least three genes selected from the group consisting of Gene Number 4164 (TMEM201), Gene Number 4166 (VPS13D), Gene Number 4337 (IPO9), Gene Number 4344 (LAX1), Gene Number 4350 (MFSD4), Gene Number 4356 (DTL), Gene Number 4578 (MIR181A1HG), Gene Number 4709 (GBF1), Gene Number 5478 (PNN), Gene Number 5518, and Gene Number 7345 (OTTHUMG00000162679). In some cases, the plurality of exon regions of genes selected from Table 6 comprise at least four genes selected from the group consisting of Gene Number 4164 (TMEM201), Gene Number 4166 (VPS13D), Gene Number 4337 (IPO9), Gene Number 4344 (LAX1), Gene Number 4350 (MFSD4), Gene Number 4356 (DTL), Gene Number 4578 (MIR181A1HG), Gene Number 4709 (GBF1), Gene Number 5478 (PNN), Gene Number 5518, and Gene Number 7345 (OTTHUMG00000162679). In some cases, the plurality of exon regions of genes selected from Table 6 comprise at least five genes selected from the group consisting of Gene Number 4164 (TMEM201), Gene Number 4166 (VPS13D), Gene Number 4337 (IPO9), Gene Number 4344 (LAX1), Gene Number 4350 (MFSD4), Gene Number 4356 (DTL), Gene Number 4578 (MIR181A1HG), Gene Number 4709 (GBF1), Gene Number 5478 (PNN), Gene Number 5518, and Gene Number 7345 (OTTHUMG00000162679). In some cases, the plurality of exon regions of genes selected from Table 6 comprise at least six genes selected from the group consisting of Gene Number 4164 (TMEM201), Gene Number 4166 (VPS13D), Gene Number 4337 (IPO9), Gene Number 4344 (LAX1), Gene Number 4350 (MFSD4), Gene Number 4356 (DTL), Gene Number 4578 (MIR181A1HG), Gene Number 4709 (GBF1), Gene Number 5478 (PNN), Gene Number 5518, and Gene Number 7345 (OTTHUMG00000162679). In some cases, the plurality of exon regions of genes selected from Table 6 comprise Gene Number 4164 (TMEM201), Gene Number 4166 (VPS13D), Gene Number 4337 (IPO9), Gene Number 4344 (LAX1), Gene Number 4350 (MFSD4), Gene Number 4356 (DTL), Gene Number 4578 (MIR181A1HG), Gene Number 4709 (GBF1), Gene Number 5478 (PNN), Gene Number 5518, and Gene Number 7345 (OTTHUMG00000162679). In some cases, the plurality of exon regions of genes selected from Table 6 consist of Gene Number 4164 (TMEM201), Gene Number 4166 (VPS13D), Gene Number 4337 (IPO9), Gene Number 4344 (LAX1), Gene Number 4350 (MFSD4), Gene Number 4356 (DTL), Gene Number 4578 (MIR181A1HG), Gene Number 4709 (GBF1), Gene Number 5478 (PNN), Gene Number 5518, and Gene Number 7345 (OTTHUMG00000162679).

[0080] In some cases, the plurality of exon regions of genes selected from Table 6 comprise at least one gene selected from the group consisting of Gene Number 4257 (RWDD3), Gene Number 4628 (ATP5C1), Gene Number 5514 (TDP1), Gene Number 5681 (FAM81A), Gene Number 5696 (NR2E3), Gene Number 5713 (SEMA4B), Gene Number 5764 (MGC15885), Gene Number 6810, Gene Number 6876, Gene Number 7053 (IL10RB), and Gene Number 7155 (POLR2F). In some cases, the plurality of exon regions of genes selected from Table 6 comprise at least two genes selected from the group consisting of Gene Number 4257 (RWDD3), Gene Number 4628 (ATP5C1), Gene Number 5514 (TDP1), Gene Number 5681 (FAM81A), Gene Number 5696 (NR2E3), Gene Number 5713 (SEMA4B), Gene Number 5764 (MGC15885), Gene Number 6810, Gene Number 6876, Gene Number 7053 (IL10RB), and Gene Number 7155 (POLR2F). In some cases, the plurality of exon regions of genes selected from Table 6 comprise at least three genes selected from the group consisting of Gene Number 4257 (RWDD3), Gene Number 4628 (ATP5C1), Gene Number 5514 (TDP1), Gene Number 5681 (FAM81A), Gene Number 5696 (NR2E3), Gene Number 5713 (SEMA4B), Gene Number 5764 (MGC15885), Gene Number 6810, Gene Number 6876, Gene Number 7053 (IL10RB), and Gene Number 7155 (POLR2F). In some cases, the plurality of exon regions of genes selected from Table 6 comprise at least four genes selected from the group consisting of Gene Number 4257 (RWDD3), Gene Number 4628 (ATP5C1), Gene Number 5514 (TDP1), Gene Number 5681 (FAM81A), Gene Number 5696 (NR2E3), Gene Number 5713 (SEMA4B), Gene Number 5764 (MGC15885), Gene Number 6810, Gene Number 6876, Gene Number 7053 (IL10RB), and Gene Number 7155 (POLR2F). In some cases, the plurality of exon regions of genes selected from Table 6 comprise at least five genes selected from the group consisting of Gene Number 4257 (RWDD3), Gene Number 4628 (ATP5C1), Gene Number 5514 (TDP1), Gene Number 5681 (FAM81A), Gene Number 5696 (NR2E3), Gene Number 5713 (SEMA4B), Gene Number 5764 (MGC15885), Gene Number 6810, Gene Number 6876, Gene Number 7053 (IL10RB), and Gene Number 7155 (POLR2F). In some cases, the plurality of exon regions of genes selected from Table 6 comprise at least six genes selected from the group consisting of Gene Number 4257 (RWDD3), Gene Number 4628 (ATP5C1), Gene Number 5514 (TDP1), Gene Number 5681 (FAM81A), Gene Number 5696 (NR2E3), Gene Number 5713 (SEMA4B), Gene Number 5764 (MGC15885), Gene Number 6810, Gene Number 6876, Gene Number 7053 (IL10RB), and Gene Number 7155 (POLR2F). In some cases, the plurality of exon regions of genes selected from Table 6 comprise Gene Number 4257 (RWDD3), Gene Number 4628 (ATP5C1), Gene Number 5514 (TDP1), Gene Number 5681 (FAM81A), Gene Number 5696 (NR2E3), Gene Number 5713 (SEMA4B), Gene Number 5764 (MGC15885), Gene Number 6810, Gene Number 6876, Gene Number 7053 (IL10RB), and Gene Number 7155 (POLR2F). In some cases, the plurality of exon regions of genes selected from Table 6 consist of Gene Number 4257 (RWDD3), Gene Number 4628 (ATP5C1), Gene Number 5514 (TDP1), Gene Number 5681 (FAM81A), Gene Number 5696 (NR2E3), Gene Number 5713 (SEMA4B), Gene Number 5764 (MGC15885), Gene Number 6810, Gene Number 6876, Gene Number 7053 (IL10RB), and Gene Number 7155 (POLR2F).

[0081] In some cases, the plurality of exon regions of genes selected from Table 6 comprise at least one gene selected from the group consisting of Gene Number 4151 (PLEKHN1), Gene Number 4337 (IPO9), Gene Number 4350 (MFSD4), Gene Number 4381 (OR2L13), Gene Number 4402 (FLJ42875), Gene Number 4460 (LOC100130557), Gene Number 4511 (CASQ2), Gene Number 4915 (HEPHL1), and Gene Number 7275 (SLC22A14). In some cases, the plurality of exon regions of genes selected from Table 6 comprise at least two genes selected from the group consisting of Gene Number 4151 (PLEKHN1), Gene Number 4337 (IPO9), Gene Number 4350 (MFSD4), Gene Number 4381 (OR2L13), Gene Number 4402 (FLJ42875), Gene Number 4460 (LOC100130557), Gene Number 4511 (CASQ2), Gene Number 4915 (HEPHL1), and Gene Number 7275 (SLC22A14). In some cases, the plurality of exon regions of genes selected from Table 6 comprise at least three genes selected from the group consisting of Gene Number 4151 (PLEKHN1), Gene Number 4337 (IPO9), Gene Number 4350 (MFSD4), Gene Number 4381 (OR2L13), Gene Number 4402 (FLJ42875), Gene Number 4460 (LOC100130557), Gene Number 4511 (CASQ2), Gene Number 4915 (HEPHL1), and Gene Number 7275 (SLC22A14). In some cases, the plurality of exon regions of genes selected from Table 6 comprise at least four genes selected from the group consisting of Gene Number 4151 (PLEKHN1), Gene Number 4337 (IPO9), Gene Number 4350 (MFSD4), Gene Number 4381 (OR2L13), Gene Number 4402 (FLJ42875), Gene Number 4460 (LOC100130557), Gene Number 4511 (CASQ2), Gene Number 4915 (HEPHL1), and Gene Number 7275 (SLC22A14). In some cases, the plurality of genes selected from Table 6 comprise at least five genes selected from the group consisting of exon regions of Gene Number 4151 (PLEKHN1), Gene Number 4337 (IPO9), Gene Number 4350 (MFSD4), Gene Number 4381 (OR2L13), Gene Number 4402 (FLJ42875), Gene Number 4460 (LOC100130557), Gene Number 4511 (CASQ2), Gene Number 4915 (HEPHL1), and Gene Number 7275 (SLC22A14). In some cases, the plurality of exon regions of genes selected from Table 6 comprise at least six genes selected from the group consisting of Gene Number 4151 (PLEKHN1), Gene Number 4337 (IPO9), Gene Number 4350 (MFSD4), Gene Number 4381 (OR2L13), Gene Number 4402 (FLJ42875), Gene Number 4460 (LOC100130557), Gene Number 4511 (CASQ2), Gene Number 4915 (HEPHL1), and Gene Number 7275 (SLC22A14). In some cases, the plurality of exon regions of genes selected from Table 6 comprise Gene Number 4151 (PLEKHN1), Gene Number 4337 (IPO9), Gene Number 4350 (MFSD4), Gene Number 4381 (OR2L13), Gene Number 4402 (FLJ42875), Gene Number 4460 (LOC100130557), Gene Number 4511 (CASQ2), Gene Number 4915 (HEPHL1), and Gene Number 7275 (SLC22A14). In some cases, the plurality of exon regions of genes selected from Table 6 consist of Gene Number 4151 (PLEKHN1), Gene Number 4337 (IPO9), Gene Number 4350 (MFSD4), Gene Number 4381 (OR2L13), Gene Number 4402 (FLJ42875), Gene Number 4460 (LOC100130557), Gene Number 4511 (CASQ2), Gene Number 4915 (HEPHL1), and Gene Number 7275 (SLC22A14).

[0082] In some cases, the plurality of exon regions of genes selected from Table 6 comprise at least one gene selected from the group consisting of Gene Number 4167 (PDPN), Gene Number 4173 (PLA2G5), Gene Number 4196, Gene Number 4176 (EPHA8), Gene Number 4352 (PFKFB2), Gene Number 4837, Gene Number 5491 (PPM1A), Gene Number 6266 (DTNA), Gene Number 6813 (FAM178B), and Gene Number 7393. In some cases, the plurality of exon regions of genes selected from Table 6 comprise at least two genes selected from the group consisting of Gene Number 4167 (PDPN), Gene Number 4173 (PLA2G5), Gene Number 4196, Gene Number 4176 (EPHA8), Gene Number 4352 (PFKFB2), Gene Number 4837, Gene Number 5491 (PPM1A), Gene Number 6266 (DTNA), Gene Number 6813 (FAM178B), and Gene Number 7393. In some cases, the plurality of exon regions of genes selected from Table 6 comprise at least three genes selected from the group consisting of Gene Number 4167 (PDPN), Gene Number 4173 (PLA2G5), Gene Number 4196, Gene Number 4176 (EPHA8), Gene Number 4352 (PFKFB2), Gene Number 4837, Gene Number 5491 (PPM1A), Gene Number 6266 (DTNA), Gene Number 6813 (FAM178B), and Gene Number 7393. In some cases, the plurality of exon regions of genes selected from Table 6 comprise at least four genes selected from the group consisting of Gene Number 4167 (PDPN), Gene Number 4173 (PLA2G5), Gene Number 4196, Gene Number 4176 (EPHA8), Gene Number 4352 (PFKFB2), Gene Number 4837, Gene Number 5491 (PPM1A), Gene Number 6266 (DTNA), Gene Number 6813 (FAM178B), and Gene Number 7393. In some cases, the plurality of exon regions of genes selected from Table 6 comprise at least five genes selected from the group consisting of Gene Number 4167 (PDPN), Gene Number 4173 (PLA2G5), Gene Number 4196, Gene Number 4176 (EPHA8), Gene Number 4352 (PFKFB2), Gene Number 4837, Gene Number 5491 (PPM1A), Gene Number 6266 (DTNA), Gene Number 6813 (FAM178B), and Gene Number 7393. In some cases, the plurality of exon regions of genes selected from Table 6 comprise at least six genes selected from the group consisting of Gene Number 4167 (PDPN), Gene Number 4173 (PLA2G5), Gene Number 4196, Gene Number 4176 (EPHA8), Gene Number 4352 (PFKFB2), Gene Number 4837, Gene Number 5491 (PPM1A), Gene Number 6266 (DTNA), Gene Number 6813 (FAM178B), and Gene Number 7393. In some cases, the plurality of exon regions of genes selected from Table 6 comprise Gene Number 4167 (PDPN), Gene Number 4173 (PLA2G5), Gene Number 4196, Gene Number 4176 (EPHA8), Gene Number 4352 (PFKFB2), Gene Number 4837, Gene Number 5491 (PPM1A), Gene Number 6266 (DTNA), Gene Number 6813 (FAM178B), and Gene Number 7393. In some cases, the plurality of exon regions of genes selected from Table 6 consist of Gene Number 4167 (PDPN), Gene Number 4173 (PLA2G5), Gene Number 4196, Gene Number 4176 (EPHA8), Gene Number 4352 (PFKFB2), Gene Number 4837, Gene Number 5491 (PPM1A), Gene Number 6266 (DTNA), Gene Number 6813 (FAM178B), and Gene Number 7393.

[0083] In some cases, the plurality of exon regions of genes selected from Table 6 comprise at least one gene selected from the group consisting of Gene Number 4145 (PLEKHN1), Gene Number 4166 (VPS13D), Gene Number 4590 (PLXNA2), Gene Number 4952 (ST14), Gene Number 5042 (LTBP3), Gene Number 5181 (ACSS3), Gene Number 5209 (ATP2A2), Gene Number 6714 (BCS1L), Gene Number 6809, Gene Number 7007 (CPNE1), Gene Number 7354 (COL6A6), Gene Number 7458 (LINC00971), and Gene Number 7474 (HGD). In some cases, the plurality of genes of exon regions selected from Table 6 comprise at least two genes selected from the group consisting of Gene Number 4145 (PLEKHN1), Gene Number 4166 (VPS13D), Gene Number 4590 (PLXNA2), Gene Number 4952 (ST14), Gene Number 5042 (LTBP3), Gene Number 5181 (ACSS3), Gene Number 5209 (ATP2A2), Gene Number 6714 (BCS1L), Gene Number 6809, Gene Number 7007 (CPNE1), Gene Number 7354 (COL6A6), Gene Number 7458 (LINC00971), and Gene Number 7474 (HGD). In some cases, the plurality of exon regions of genes selected from Table 6 comprise at least three genes selected from the group consisting of Gene Number 4145 (PLEKHN1), Gene Number 4166 (VPS13D), Gene Number 4590 (PLXNA2), Gene Number 4952 (ST14), Gene Number 5042 (LTBP3), Gene Number 5181 (ACSS3), Gene Number 5209 (ATP2A2), Gene Number 6714 (BCS1L), Gene Number 6809, Gene Number 7007 (CPNE1), Gene Number 7354 (COL6A6), Gene Number 7458 (LINC00971), and Gene Number 7474 (HGD). In some cases, the plurality of exon regions of genes selected from Table 6 comprise at least four genes selected from the group consisting of Gene Number 4145 (PLEKHN1), Gene Number 4166 (VPS13D), Gene Number 4590 (PLXNA2), Gene Number 4952 (ST14), Gene Number 5042 (LTBP3), Gene Number 5181 (ACSS3), Gene Number 5209 (ATP2A2), Gene Number 6714 (BCS1L), Gene Number 6809, Gene Number 7007 (CPNE1), Gene Number 7354 (COL6A6), Gene Number 7458 (LINC00971), and Gene Number 7474 (HGD). In some cases, the plurality of exon regions of genes selected from Table 6 comprise at least five genes selected from the group consisting of Gene Number 4145 (PLEKHN1), Gene Number 4166 (VPS13D), Gene Number 4590 (PLXNA2), Gene Number 4952 (ST14), Gene Number 5042 (LTBP3), Gene Number 5181 (ACSS3), Gene Number 5209 (ATP2A2), Gene Number 6714 (BCS1L), Gene Number 6809, Gene Number 7007 (CPNE1), Gene Number 7354 (COL6A6), Gene Number 7458 (LINC00971), and Gene Number 7474 (HGD). In some cases, the plurality of exon regions of genes selected from Table 6 comprise at least six genes selected from the group consisting of Gene Number 4145 (PLEKHN1), Gene Number 4166 (VPS13D), Gene Number 4590 (PLXNA2), Gene Number 4952 (ST14), Gene Number 5042 (LTBP3), Gene Number 5181 (ACSS3), Gene Number 5209 (ATP2A2), Gene Number 6714 (BCS1L), Gene Number 6809, Gene Number 7007 (CPNE1), Gene Number 7354 (COL6A6), Gene Number 7458 (LINC00971), and Gene Number 7474 (HGD). In some cases, the plurality of exon regions of genes selected from Table 6 comprise Gene Number 4145 (PLEKHN1), Gene Number 4166 (VPS13D), Gene Number 4590 (PLXNA2), Gene Number 4952 (ST14), Gene Number 5042 (LTBP3), Gene Number 5181 (ACSS3), Gene Number 5209 (ATP2A2), Gene Number 6714 (BCS1L), Gene Number 6809, Gene Number 7007 (CPNE1), Gene Number 7354 (COL6A6), Gene Number 7458 (LINC00971), and Gene Number 7474 (HGD). In some cases, the plurality of genes selected from Table 6 consist of Gene Number 4145 (PLEKHN1), Gene Number 4166 (VPS13D), Gene Number 4590 (PLXNA2), Gene Number 4952 (ST14), Gene Number 5042 (LTBP3), Gene Number 5181 (ACSS3), Gene Number 5209 (ATP2A2), Gene Number 6714 (BCS1L), Gene Number 6809, Gene Number 7007 (CPNE1), Gene Number 7354 (COL6A6), Gene Number 7458 (LINC00971), and Gene Number 7474 (HGD).

[0084] Further, the expression levels may be compared to control ranges disclosed here to generate an output/report indicative of the subject's having or risk of having a condition comprising perfusion shortage with an accuracy greater than about 99%. In some embodiments, the accuracy is about 98.5%, 98%, 97.5%, 97%, 96.5%, 96%, 95.5%, 95%, 94.5%, 94%, 93.5%, 93%, 92.5%, 92%, or 91.5%.

TABLE 21

| Code | | |
|---|---|---|
| PSC | biomarker nucleotide seq Probe | biomarker nucleotide seq target mRNA |
| 1673 | GACCGGGTGTTGGTGCGGCTATTAC | CTGGCCCACAACCACGCCGATAATG |
| 6351 | AGAAGGAGCCCGACCAGGTTCTACC | TCTTCCTCGGGCTGGTCCAAGATGG |
| 6767 | GTGGTGGTGCCCACTGTGGTCCTAC | CACCACCACGGGTGACACCAGGATG |
| 6774 | CTGTGTGTGCCCTTCACAAGAGGTT | GACACACACGGGAAGTGTTCTCCAA |
| 9512 | CTCGGCGCCCAGCTGCGTGCGTGCA | GAGCCGCGGGTCGACGCACGCACGT |
| 11081 | GGAGACTCTCCCAAAGGAACCATAG | CCTCTGAGAGGGTTTCCTTGGTATC |
| 15750 | CTCGAGTCTCCCAGAGGTCCATTGT | GAGCTCAGAGGGTCTCCAGGTAACA |
| 15852 | CTTTATCCCAGAAATGGTGACCGGT | GAAATAGGGTCTTTACCACTGGCCA |
| 16655 | ACTATCTACTCCCAGTAGTGACGCG | TGATAGATGAGGGTCATCACTGCGC |
| 18080 | GTCTGCCGACCCACCGTTTATGTTT | CAGACGGCTGGGTGGCAAATACAAA |
| 19099 | GGACACACACCCACGTGTAAACACA | CCTGTGTGTGGGTGCACATTTGTGT |
| 19994 | AAGACCTACCCACGTCCGACATGGT | TTCTGGATGGGTGCAGGCTGTACCA |
| 21717 | GTACGCTTAGGCCAGTCTTGACCAG | CATGCGAATCCGGTCAGAACTGGTC |
| 27227 | GAAGGTCTTCCCGTTGTTCGCTCCA | CTTCCAGAAGGGCAACAAGCGAGGT |
| 27604 | GAACTTCCGTCCCTGCACTGAAAGG | CTTGAAGGCAGGGACGTGACTTTCC |
| 29415 | CCGAATCTCCCTCTGTGTAGAGTCT | GGCTTAGAGGGAGACACATCTCAGA |
| 36768 | TTACTAGACGTTCCAGAGTCAGGGG | AATGATCTGCAAGGTCTCAGTCCCC |
| 39687 | GATCCTTTCCACTCGCGCTAGAGCG | CTAGGAAAGGTGAGCGCGATCTCGC |
| 41366 | CGCCGCAGTCCACCGCCGACGGCGT | GCGGCGTCAGGTGGCGGCTGCCGCA |
| 42955 | CTCTCCGTGTCCAAAGTTCTGTGTA | GAGAGGCACAGGTTTCAAGACACAT |
| 49089 | AGTCCAGACCCTTCGTGACTGGTCG | TCAGGTCTGGGAAGCACTGACCAGC |
| 53130 | ATAAGAGACCCTCACTGAGTCACGG | TATTCTCTGGGAGTGACTCAGTGCC |
| 53947 | AGGTCCGACCCTCTCACGAGTGGAT | TCCAGGCTGGGAGAGTGCTCACCTA |
| 55338 | GTACACACAGGCCTTCACACACGGG | CATGTGTGTCCGGAAGTGTGTGCCC |
| 58129 | AGAGTTTCCCTAAAGTTCTACGACA | TCTCAAAGGGATTTCAAGATGCTGT |
| 58782 | GTCACGCCTCGCCTCAGCCAAGACC | CAGTGCGGAGCGGAGTCGGTTCTGG |
| 59746 | GGACCGGGCCTACCACGACCGAGGT | CCTGGCCCGGATGGTGCTGGCTCCA |
| 60909 | ACGACCAGCGCCTAGACGACATGGA | TGCTGGTCGCGGATCTGCTGTACCT |
| 64432 | ACTCCGTCCTCCTTTCTGGATGAAG | TGAGGCAGGAGGAAAGACCTACTTC |
| 65832 | GTTACGGACCTCCTCACATCGGCAG | CAATGCCTGGAGGAGTGTAGCCGTC |
| 72889 | GGTTCGGTGTCCTCGAATCGTGTCA | CCAAGCCACAGGAGCTTAGCACAGT |
| 74978 | GGTCTCCACGTCCTCGTTCAAGTGT | CCAGAGGTGCAGGAGCAAGTTCACA |
| 75770 | CTTCTTGTCCTAACCGGTCTACGCA | GAAGAACAGGATTGGCCAGATGCGT |
| 76500 | TTTAAGCTCCTACCGGATAGAGTGT | AAATTCGAGGATGGCCTATCTCACA |
| 89931 | AATCCTACACCACTCCTCTTCGACG | TTAGGATGTGGTGAGGAGAAGCTGC |
| 100396 | AGACCACACACCTTTGACTGCCACC | TCTGGTGTGTGGAAACTGACGGTGG |
| 125863 | AATCCGGTCCGACATCGACCAGGAG | TTAGGCCAGGCTGTAGCTGGTCCTC |
| 128031 | CCGCACGACTCCGACTTTTACCGTA | GGCGTGCTGAGGCTGAAAATGGCAT |
| 128748 | AAGAGTTCCCGTTATTTCAATCCGT | TTCTCAAGGGCAATAAAGTTAGGCA |
| 128806 | CGATTGGCCGTTAAACTATGGTTTC | GCTAACCGGCAATTTGATACCAAAG |
| 130619 | GTTTTTACCCGTCCTCGTGTCACTG | CAAAAATGGGCAGGAGCACAGTGAC |
| 144225 | ACAACAACACCGTCCTCGTGAGGTC | TGTTGTTGTGGCAGGAGCACTCCAG |
| 185975 | TCCGTCGCTGGGTGATGGAACATGA | AGGCAGCGACCCACTACCTTGTACT |
| 196417 | CCGGTCGTTGGTTGAGTGTTTATGA | GGCCAGCAACCAACTCACAAATACT |
| 223602 | ATTCCCAGGACACCACCAGAGGGCT | TAAGGGTCCTGTGGTGGTCTCCCGA |
| 229451 | ATCCGGTTAGGGAGTGTGTCCAATT | TAGGCCAATCCCTCACACAGGTTAA |
| 231682 | CGAGGACAGTAGGAACGGAGAACCC | GCTCCTGTCATCCTTGCCTCTTGGG |
| 242908 | TCTTGAAGAGGTCCCGCGACCGTGT | AGAACTTCTCCAGGGCGCTGGCACA |
| 249198 | TCAAGAACTAGGTCGCGACGAGGGT | AGTTCTTGATCCAGCGCTGCTCCCA |
| 252213 | GCGCGGCCCGGCTGGGCGTAGAGGG | CGCGCCGGGCCGACCCGCATCTCCC |
| 295450 | CCCGTCTTGCCTCGATAGGTAGGTC | GGGCAGAACGGAGCTATCCATCCAG |
| 306673 | GCCACTGCGGCTAGGACACTCGTAA | CGGTGACGCCGATCCTGTGAGCATT |
| 327300 | CTCTCAATGCGCTTTCCTCAGGAGG | GAGAGTTACGCGAAAGGAGTCCTCC |
| 468772 | ACGACGCAGGCAACTTCGTTGGCGG | TGCTGCGTCCGTTGAAGCAACCGCC |
| 529042 | GTCCGGACGGCAGATATCAGATACC | CAGGCCTGCCGTCTATAGTCTATGG |
| 561044 | GCACGTCACCAACCTTCGTAGTCGA | CGTGCAGTGGTTGGAAGCATCAGCT |
| 588830 | CGTATCTACAAACGGAGGAGAACCT | GCATAGATGTTTGCCTCCTCTTGGA |
| 604042 | AACTACTTCCACAGTGTTGCCGTTC | TTGATGAAGGTGTCACAACGGCAAG |
| 604967 | GTCCATCTCCACACTGGGGTCCTGA | CAGGTAGAGGTGTGACCCCAGGACT |
| 616095 | GTCCTACCACCACTAGTTGCACGGG | CAGGATGGTGGTGATCAACGTGCCC |
| 622161 | GACCCTCTGACACCCACTAGGAGGT | CTGGGAGACTGTGGGTGATCCTCCA |
| 622702 | GATAACCCACACAACATTTGTCTTC | CTATTGGGTGTGTTGTAAACAGAAG |
| 639146 | ACAAACAGACACGAAGATTTTCCAG | TGTTTGTCTGTGCTTCTAAAAGGTC |
| 669436 | CGGTCCGTCGGATATCCTTATCATT | GCCAGGCAGCCTATAGGAATAGTAA |
| 708420 | CGATCGGGTGAGGTGTCTAAAAACT | GCTAGCCCACTCCACAGATTTTTGA |
| 751418 | NA | NA |
| 752527 | ATTCCCACGATACGCGAGTCAGAGG | TAAGGGTGCTATGCGCTCAGTCTCC |
| 772367 | GCAAAGGGACACACTCCACCACGGT | CGTTTCCCTGTGTGAGGTGGTGCCA |
| 883312 | GTTCTCTGTACGTATTGTGCAAAAT | CAAGAGACATGCATAACACGTTTTA |
| 906039 | GTAAATAACTTGTTCGATCGGACAA | CATTTATTGAACAAGCTAGCCTGTT |
| 939909 | ACCTAGAGTCCTTTCGACGGTCGTA | TGGATCTCAGGAAAGCTGCCAGCAT |
| 1020364 | AGAGACGGGTTCCACTCCCTTGAGT | TCTCTGCCCAAGGTGAGGGAACTCA |
| 1059015 | CGACGTACAAGTATCAGTAGGTGGA | GCTGCATGTTCATAGTCATCCACCT |
| 1072725 | AAGAATTTCGTGGTGTAGTTGGAAT | TTCTTAAAGCACCACATCAACCTTA |
| 1099142 | ACATAGTGTCCTCTTTGGTCGTCCC | TGTATCACAGGAGAAACCAGCAGGG |
| 1331569 | CCCGGTGTCTAGTCCACGAAGACGT | GGGCCACAGATCAGGTGCTTCTGCA |
| 1354360 | GGAAGAGGTCTACTGCACCGACAGT | CCTTCTCCAGATGACGTGGCTGTCA |

TABLE 22

| Affymetrix | Transcript | SEQ | | | |
|---|---|---|---|---|---|
| Exon ID B | Cluster ID | Name | Strand | Strand Start | Strand Stop |
| 16650657 | 16650657 | — | — | — | — |
| 16650745 | 16650745 | — | — | — | — |
| 16651179 | 16651179 | — | — | — | — |
| 16651711 | 16651711 | — | — | — | — |
| 16651915 | 16651915 | — | — | — | — |
| 16651933 | 16651933 | — | — | — | — |
| 16652239 | 16652239 | — | — | — | — |
| 16652289 | 16652289 | — | — | — | — |
| 16652527 | 16652527 | — | — | — | — |
| 16652597 | 16652597 | — | — | — | — |
| 16653327 | 16653327 | — | — | — | — |
| 16655117 | 16655117 | — | — | — | — |
| 16655411 | 16655411 | — | — | — | — |
| 16656923 | 16656923 | — | — | — | — |
| 16657593 | 16657572 | chr1 | + | 911095 | 911203 |
| 16657854 | 16657848 | chr1 | + | 1543079 | 1543119 |
| 16658040 | 16658023 | chr1 | + | 2426362 | 2426386 |
| 16658687 | 16658674 | chr1 | + | 9671844 | 9671904 |
| 16659314 | 16659251 | chr1 | + | 12439570 | 12439594 |
| 16659467 | 16659459 | chr1 | + | 13922361 | 13922421 |
| 16659653 | 16659650 | chr1 | + | 15860772 | 15860796 |
| 16660293 | 16660282 | chr1 | + | 20411334 | 20411363 |
| 16660567 | 16660555 | chr1 | + | 22924244 | 22924268 |
| 16660942 | 16660933 | chr1 | + | 25889465 | 25889547 |
| 16661236 | 16661206 | chr1 | + | 26883177 | 26883201 |
| 16662358 | 16662357 | chr1 | + | 35661576 | 35661663 |
| 16662955 | 16662945 | chr1 | + | 40431586 | 40431686 |
| 16663887 | 16663871 | chr1 | + | 44684284 | 44684308 |
| 16666083 | 16666082 | chr1 | + | 71413125 | 71413151 |
| 16667412 | 16667385 | chr1 | + | 95712525 | 95712665 |
| 16667429 | 16667427 | chr1 | + | 95978079 | 95978160 |
| 16675846 | 16675844 | chr1 | + | 201804083 | 201804107 |
| 16676222 | 16676217 | chr1 | + | 203738776 | 203738809 |
| 16676511 | 16676498 | chr1 | + | 205569535 | 205569588 |
| 16676715 | 16676693 | chr1 | + | 207245602 | 207245626 |
| 16677217 | 16677201 | chr1 | + | 212274092 | 212274116 |
| 16679760 | 16679759 | chr1 | + | 248100578 | 248100658 |
| 16680781 | 16680770 | chr1 | − | 2979261 | 2979594 |
| 16684441 | 16684439 | chr1 | − | 31934171 | 31934242 |
| 16685867 | 16685866 | chr1 | − | 41154797 | 41157855 |
| 16685996 | 16685986 | chr1 | − | 42915653 | 42915677 |
| 16691349 | 16691333 | chr1 | − | 116311348 | 116311413 |
| 16696420 | 16696416 | chr1 | − | 173019898 | 173019989 |
| 16697659 | 16697654 | chr1 | − | 198906415 | 198906539 |
| 16698835 | 16698816 | chr1 | − | 208219352 | 208219376 |
| 16702313 | 16702311 | chr10 | + | 7830190 | 7830214 |
| 16708599 | 16708579 | chr10 | + | 104125274 | 104125298 |
| 16723812 | 16723803 | chr11 | + | 41857963 | 41857987 |
| 16730164 | 16730157 | chr11 | + | 93803602 | 93803707 |
| 16733477 | 16733473 | chr11 | + | 130058031 | 130058055 |
| 16740437 | 16740412 | chr11 | − | 65315216 | 65315240 |
| 16754738 | 16754729 | chr12 | + | 81537188 | 81537212 |
| 16756959 | 16756923 | chr12 | + | 110788494 | 110788518 |
| 16764284 | 16764238 | chr12 | − | 49504637 | 49504661 |
| 16783655 | 16783644 | chr14 | + | 39648245 | 39648280 |
| 16784915 | 16784909 | chr14 | + | 60733933 | 60733991 |
| 16787392 | 16787364 | chr14 | + | 90485693 | 90485717 |
| 16787649 | 16787642 | chr14 | + | 93359618 | 93359819 |
| 16792584 | 16792550 | chr14 | − | 50296038 | 50296062 |
| 16793638 | 16793632 | chr14 | − | 61447572 | 61447600 |
| 16801591 | 16801577 | chr15 | + | 59752184 | 59752276 |
| 16802685 | 16802681 | chr15 | + | 72102896 | 72102961 |
| 16804744 | 16804716 | chr15 | + | 90768778 | 90768802 |
| 16810304 | 16810298 | chr15 | − | 62936970 | 62937310 |
| 16819053 | 16819052 | chr16 | + | 55358040 | 55358655 |
| 16844154 | 16844137 | chr17 | − | 37557842 | 37557872 |
| 16851838 | 16851824 | chr18 | + | 29797774 | 29797878 |
| 16851883 | 16851866 | chr18 | + | 32409010 | 32409034 |
| 16890974 | 16890970 | chr2 | + | 219524492 | 219524516 |
| 16900045 | 16900044 | chr2 | − | 88529113 | 88529181 |
| 16900226 | 16900225 | chr2 | − | 95512287 | 95512384 |
| 16900670 | 16900657 | chr2 | − | 97613582 | 97613606 |
| 16907908 | 16907904 | chr2 | − | 213768128 | 213768160 |
| 16918801 | 16918797 | chr20 | − | 34214399 | 34214423 |
| 16922251 | 16922243 | chr21 | + | 34655474 | 34655536 |
| 16930003 | 16929994 | chr22 | + | 38363654 | 38363678 |
| 16939185 | 16939184 | chr3 | + | 38323792 | 38323817 |
| 16944985 | 16944982 | chr3 | + | 126006929 | 126006965 |
| 16945570 | 16945543 | chr3 | + | 130345367 | 130345391 |
| 16950391 | 16950390 | chr3 | − | 8406218 | 8406333 |
| 16956502 | 16956486 | chr3 | − | 84911918 | 84911942 |
| 16957913 | 16957906 | chr3 | − | 120360496 | 120360520 |
| 16964029 | 16964027 | chr4 | + | 1801084 | 1801233 |
| 17088090 | 17088084 | chr9 | + | 114409409 | 114409538 |

[0085] Several suitable statistical methods may be employed to compare the measured expression levels of genes from the plurality of genes listed in Tables 1-6 to control ranges disclosed herein. Non-limiting examples of suitable statistical methods that can be used for statistical analysis in the detection methods disclosed herein include the group consisting of Fisher Discriminant analysis (FDA), Diagonal linear discriminant analysis (DLDA), Linear discriminant analysis (LDA), linear discriminant analysis based on partial least-squares (PLSLDA), partial least squares random Forest (PLSRF), orthogonal discriminant analysis (QDA), Random Forest (RF), or a combination thereof. Examples of suitable statistical methods are listed in Table 1, for example Support Vector Machine, Quadratic Discriminant analysis, and Fisher's Discriminant analysis (FDA). It is noted that FDA has been shown to provide accurate results for both male and female subjects.

TABLE 7
Table: Overview of the classification models provided via CMA [2, 3-14].

| Method name | Package | Reference |
|---|---|---|
| Component wise Boosting | CMA | Bühlmann and Yu [2003] |
| Elastic Net | glmpath | Zhou and Hastie [2004] |
| Flexible Discriminant Analysis | mgcv | Ripley [1996] |
| Tree-based Boosting | gbm | Friedman [2001] |
| k-nearest neighbours | class | Ripley [1996] |
| Lasso | glmpath | Young-Park and Hastie |
| | | [2007] |
| Feed-Forward Neural Networks | nnet | Ripley [1996] |
| Probalistic nearest neighbours | CMA | — |
| Penalized Logistic Regression | CMA | Zhu [1996] |
| Probabilistic Neural Networks | CMA | Specht [1990] |
| PAM | CMA | Tibshirani et al [2002] |
| Shrinkage Discriminant Analysis | CMA | — |
| Support Vector Machine | e1071 | Schölkopf and Smola |
| | | [2002] |
| Diagonal Discriminant Analysis | CMA | McLachlan[1992] |
| Fisher's Discriminant Analysis | CMA | Ripley [1996] |
| Linear Discriminant Analysis | MASS | Mclachlan[1992] |
| Partial Least Squares | plsgenomics | Boulesteix and Strimmer |
| | | [2007] |
| ″ + Random Forest | plsgenomics | Boulesteix and Strimmer |
| | | [2007] |
| ″ + logistic regression | plsgenomics | Boulesteix and Strimmer |
| | | [2007] |
| Quadratic Discriminant Analysis | MASS | Mclachlan[1992] |
| Random Forest | randomForest | Breiman [2001] |

The Bioconductor library ‘CMA’ is used to make the prediction models and execute the validations [1, 2]. For the validation, a 10-fold cross validation is executed. In addition, the calculations (model generation and validation) are repeated 5 times to improve the validation measures.

### Detecting a Condition Comprising Perfusion Shortage or a Risk Thereof at an Early Stage

[0086] Conventional biomarkers in the field of cardiology or other areas where ischemia can cause serious conditions that are available to date have merely detected myocardial muscle damage after severe ischemia, but fail to detect subtle ischemia (a.k.a., angina pectoris) without muscle damage. Ischemia without muscle damage constitutes the vast majority of the cardiovascular patients in the normal cardiology outpatient clinic. Described in accordance with methods, kits, compositions, and uses of some embodiments herein are biomarkers of myocardial and cerebrovascular ischemia (or any other ischemic disease) in the absence of acute myo- or tissue necrosis (including, but not limited to, angina pectoris, transient ischemic (cerebrovascular) accident, microvascular disease and/or cerebrovascular accident). Further, in certain aspects, the present disclosure presents methods comprising obtaining said biological sample from a subject that has or is at risk for having a condition comprising perfusion shortage, wherein said perfusion shortage is at an early stage and has not caused any detectable tissue damage and assaying expression levels of two or more genes (nucleotide or protein biomarker) from a plurality of identified genes (nucleotide or protein biomarker) to generate an output comprising said expression levels indicative of said subject's having or risk of having said condition comprising perfusion shortage.

[0087] It is contemplated that methods, compositions, kits, and uses of some embodiments can detect conditions comprising perfusion shortage such as neoangiogenesis or ischemia, even when the subject presents minimal to no symptoms of the condition. In some embodiments, the subject may not present symptoms of any of ischemic cardiovascular disease, microangiopathy in cardiovascular disease (such as diastolic heart failure), hypertrophic cardiomyopathy, cardiovascular pathology with relative ischemia (such as hypertrophic CMP, ischemic heart failure, and/or congenital cardiac disease), ischemic cerebrovascular disease (including CVA/TIA, and/or vascular dementia), ischemic peripheral artery disease, venous disease, orthopedic disease, sepsis, inflammation, lymphatic disease, ophthalmological disease associated with ischemia and/or neoangiogenesis (such as neoangiogenesis in retinopathy), diabetic macro and microangiopathy, oncological pathology (including solid tumors, metastatic disease), endothelial dysfunction in cardiovascular and peripheral artery disease, ophthalmology (such as neoangiogenesis in retinopathy), diabetic macro and microangiopathy, oncological pathology (such as solid tumors and/or metastatic disease), endothelial dysfunction in cardiovascular and peripheral artery disease, nephrological disease associated with ischemia and/or neoangiogenesis, gynecological disease, orthopedic disease, lung disease (such as COPD, emphysema, lung fibrosis, cystic fibrosis, lung cancer, pulmonary interstitial disease, and/or monitoring pre- and post-lung transplantation, pulmonary emboli), cerebrovascular disease (for example, stroke, TIA, microvascular dementia, and emboli such as pulmonary emboli), deep venous thrombosis, inadequate ventilation/oxygenation of a mechanically ventilated subject, a gastrointestinal disorder (such as Crohn's disease, colitis ulcerosa), a neurodegenerative disease (such as Parkinson's disease or multiple sclerosis), erectile dysfunction, sport injury, frailty, shock (such as post-resuscitation shock), arterial and venous diseases, disease related to lymphangiogenic disease, vascular remodeling including lymphangiogenic metastatic disease, arteriovenous malformation, arterial remodeling, or venous thrombosis, or a combination of two or more of the listed items. In some embodiments, the subject may present symptoms of any of ischemic diseases disclosed herein or any other ischemic diseases.

### Measuring or Detecting Expression Levels of Selected Genes

[0088] As used herein “gene products” refer to DNA molecules, RNA molecules (such as mRNAs), particular splice variants, corresponding (translated) peptides, and/or specific downstream signaling cascades (for example, phosphorylation, acetylation, methylation, ubiquitination, SUMOylation, degradation, or subcellular localization of downstream signal transduction pathway molecules), or any combination of two or more of the listed items (any of these items may be referred to as biomarkers). Genes as disclosed herein can be measured or detected by measuring a portion of DNA molecules, RNA molecules (such as mRNAs), particular splice variants, or corresponding (translated) peptides corresponding to a particular gene from the identified set of genes. Gene products/genes that are differently expressed in ischemia and non-ischemia subjects as described herein may also be referred to as “biomarkers.” For nucleic acid gene products/genes (or nucleic acids encoding gene products/genes), it will be appreciated that the reverse transcript of a gene product/gene also provides suitable information about the gene product. Accordingly, gene product/gene can refer to either strand of a nucleic acid (e.g., the sense or antisense strand), and thus encompasses the reverse complement of a nucleic acid strand as well as the strand itself, in any reading frame on either strand.

[0089] In methods, compositions, kits, and uses of some embodiments, the specified gene products can identify diseases comprising perfusion shortage (such as ischemic episodes and neoangiogenesis processes) based on expression levels of these gene products/genes, such as DNA molecules, RNA molecules (e.g., mRNAs), particular splice variants, corresponding (translated) peptides, and/or specific downstream signaling cascades (which can be measured, for example, based on phosphorylation, ubiquitination, SUMOylation, transcription, degradation, or subcellular localization of downstream signal transduction pathway molecules), or any combination of two or more of the listed items. In some embodiments, the gene products comprise nucleic acids that are part of the genes selected from Tables 1-6. In some embodiments, the gene products comprise nucleic acids that may be used to detect the expression levels of genes selected from Tables 1-6. In some embodiments, the gene products comprise peptide sequences that are encode from the genes selected from Tables 1-6. In some embodiments, the gene products comprise peptides that can detect expression levels of protein or fragments thereof encoded by the genes selected from Tables 1-6. In some embodiments, the gene products comprise nucleic acids or peptide sequences encoded therefrom selected from any of SEQ ID NOs: 1-5103 (or a peptide sequence encoded therefrom), Genes Number 1-9280 (or a peptide sequence encoded therefrom), or nucleic acids comprising at least 2, 3, 4, 5, 6, 7, 8, 9, 10, 11, 12, 13, 14, 15, 16, 17, 18, 19, 20, 21, 22, 23, 24, 25, 26, 27, 28, 29, 30, 31, 32, 33, 34, 35, 36, 37, 38, 39, 40, 41, 42, 43, 44, 45, 46, 47, 48, 49, 50 consecutive nucleotides thereof (including ranges between any two of the listed values), or peptides encoded by any of these nucleic acids. It has been observed that RNAs or peptides of each of Tables 1, 3, and 5 are differentially expressed in hematopoietic EPCs or fractions or secretions thereof of females, and that RNAs or peptides of each of Tables 2, 4, and 6 are differentially expressed in hematopoietic EPCs or fractions or secretions thereof of males. As such, in some embodiments, for example for female subjects the gene products comprise nucleic acids or peptides selected from any of Tables 1, 3, and 5, or nucleic acids comprising at least 2, 3, 4, 5, 6, 7, 8, 9, 10, 11, 12, 13, 14, 15, 16, 17, 18, 19, 20, 21, 22, 23, 24, 25, 26, 27, 28, 29, 30, 31, 32, 33, 34, 35, 36, 37, 38, 39, 40, 41, 42, 43, 44, 45, 46, 47, 48, 49, 50 consecutive nucleotides thereof (including ranges between any two of the listed values), or peptides encoded by any of these nucleic acids. In some embodiments, for example for male subjects the gene products comprise nucleic acids or peptides selected from any Tables 2, 4, and 6, or nucleic acids comprising at least 2, 3, 4, 5, 7, 8, 9, 10, 11, 12, 13, 14, 15, 16, 17, 18, 19, 20, 21, 22, 23, 24, 25, 26, 27, 28, 29, 30, 31, 32, 33, 34, 35, 36, 37, 38, 39, 40, 41, 42, 43, 44, 45, 46, 47, 48, 49, 50 consecutive nucleotides thereof (including ranges between any two of the listed values), or peptides encoded by any of these nucleic acids.

[0090] Transcriptomics refers to global analysis of RNA expression and may elucidate genes and molecular pathways involved in biological processes. Genes showing similarities in expression pattern may be functionally related and fall under the same genetic control mechanism. Furthermore, it will be appreciated that transcriptomics can identify particular splice variants, and that splice variants can also be useful as biomarkers, as transcripts may be spliced differently under different conditions. Furthermore, it will be appreciated that transcriptomics can identify gene products such as peptides that are also useful as biomarkers, since relative levels of transcripts can correlate with, and predict, relative levels of peptides. Using transcriptomics technology, specific expression patterns of gene products have been identified, which were up-regulated under hypoxic conditions in patients with conditions comprising perfusion shortage, such as (but not limited to) myocardial ischemia (due to oxygen deprivation in the heart, which may also be referred to as angina pectoris), peripheral artery ischemia, cerebrovascular ischemia (stroke and TIA), & retinal ischemia (See Example 2 and Tables 1-6). Without being limited by theory, this altered regulation is suggestive for their involvement in a physiological ischemia-driven neoangiogenesis response.

[0091] Levels of gene products/genes (which may also be referred to herein as “levels of expression of genes/gene products” or “expression levels of genes/gene products” or “levels of biomarkers” or “levels of expression of biomarkers” or “expression levels of biomarkers”, including variations of these root terms) may be detected in accordance with methods, compositions, kits, and uses using suitable art-recognized methods. Methods, compositions, kits, and uses of some embodiments utilize gene expression profiling to identify biomarkers that exhibit differential gene expression (of DNA sequences/RNA oligonucleotide sequences) and hence DNA/RNA molecular biomarkers, as well as corresponding splice variants, peptides, and/or downstream signal transduction markers. It is noted that for a given nucleic acid sequence, a peptide may be translated from the +1, +2, or +3 position on either the sense or the antisense strand. Accordingly, a peptide corresponding to a given nucleic acid will be understood to encompass translational initiation at position +1, +2, or +3 on either of the sense or antisense stands.

[0092] It is contemplated that any suitable detection platform for DNA, RNA, peptide, and/or signal transduction biomarkers can be used in accordance with methods, compositions, uses, and kits of embodiments herein. The detection platform may have sufficient sensitivity to discriminate between levels of gene products, such as nucleic acids or peptides of any of SEQ ID NOs: 1-5103 or Genes Number 1-9280, as described herein, or corresponding peptides. For example, the detection of the peptide biomarkers or small molecules may be performed by for example, (but not limited to) ELISA, (quantitative) western blot analysis, mass spectrometry, flow cytometry, immunohistochemistry, and/or protein array, or a combination of two or more of any of the listed items. In some embodiments, ChipArray technology is used to detect expression levels of genes/genes products as described herein. In some embodiments, other technologies can be used to determine differential gene expression with sufficient sensitivity to form the basis for this assay. In some embodiments, a molecular biomarker profile can be detected irrespective of the underlying (current or future) platform, provided the technology has sufficient sensitivity to pick up this low-level differential expression. These may include (but are not limited to) qRT PCR analysis, (quantitative) Northern Blot analysis, microarray analysis, Luminex technology, Multiplexing, SAGE, RNASeq, whole transcriptome analysis, or a combination of any of these listed items. The detected expression levels of gene products in accordance with methods, compositions, kits, and uses of embodiments herein may be compared to a control range. As used herein a “control range” has its ordinary and customary meaning as would be understood by one of ordinary skill in the art in view of this disclosure. It refers to a range of expression levels of a gene/gene product in a sample of a subject that does not have the condition comprising neoangiogenesis or ischemia, for example a healthy subject. It will be appreciated that a control range can be determined experimentally (for example by detecting gene expression levels in a sample of a healthy subject or by using standard samples having gene expression levels indicative of an absence of the condition indicates a level of expression of the gene product outside of the control range) or can be obtained from an electronically or optically stored set of values (for example, from a database of control ranges). By way of example, a control range may be provided as a numerical range, or a confidence interval around a specified value. In some embodiments, an expression level of a gene product exceeds the upper limit of a control range and indicates a presence or risk of the condition comprising neoangiogenesis and/or ischemia. By way of example, expression levels of genes/gene products that are indicative of a presence or risk of the condition comprising neoangiogenesis and/or ischemia are shown in Tables 1-6. In some embodiments, if an expression level of a gene product is greater than or equal to a value in an ischemia patient of Tables 1, 3, and 5 and/or Table 2, 4, and 6, a presence or risk of the condition comprising neoangiogenesis and/or ischemia is determined. In some embodiments, the gene product does not comprise the product of any of Hspg2, Cyb5b, Adora2a, LDLRAD2, or Lgmn. In some embodiments, the gene product does not comprise the product of any of Sox18, Sox7, H01, ETS2, Rab5, Rock2, Rin3, Crip2, Kcnh2, Plvap, TNFAIP8L1, STAB1, C10orf10, Cingulin like 1, ExoC3I, CCBE1, KIAA1462, 1200015N20Rik, Agtrl-1, DLL4, or HEY1.

[0093] In some embodiments, one or more of a copy number of the at least two specified different gene products, an expression level of the at least two specified different gene products are detected, or an activity level of the at least two specified different gene products is detected.

[0094] In the method of some embodiments, the specified different gene products comprise DNA or RNA comprising one or more exons that individually or in combination comprise a sequence of Table 3 or Table 4.

[0095] The methods, compositions, kits, and uses of some embodiments (which may comprise an array as described herein) can be used for side-by-side comparison between different (anti-ischemic) therapies to demonstrate superiority or non-inferiority (in for instance clinical trials as a surrogate end-point marker). Likewise, methods, compositions, uses, kits of some embodiments may be useful, and exhibit alike properties in diseases where (the lack of or excess) tissue perfusion plays a substantial pathogenetic role or determines therapy responsiveness, including (but not limited to) oncological disease (for instance hematological metastatic disease, solid tumors), diabetic vascular complications (macro and microangiopathy), diastolic heart failure, ophthalmic neoangiogenesis disease, and renal disease, including combinations of two or more of any of the listed items. The methods, compositions, kits, and uses may comprise an array as described herein.

[0096] In some embodiments (for example, methods, compositions, kits, and uses as described herein), the expression levels of genes/gene products are assessed as levels of DNA, RNA, peptide, or any combinations thereof. The expression levels of DNA or RNA can be assessed for example by (but not limited to) cDNA chip array analysis, quantitative PCR (qPCR, such as quantitative RT PCR), microarray analysis, multiplexing, Luminex analysis, nucleic acid sequencing, northern blot analysis, comparative genomic hybridization (CGH), and/or fluorescent in situ hybridization (FISH), genomic high throughput sequencing, nanostring, massive parallel signature sequencing (MPSS), serial analysis of gene expression (SAGE), or a combination of two or more of the listed items. Further, the expression levels of peptides can be assessed for example by (but not limited to) enzyme-linked immunosorbent assay (ELISA), protein sequencing, mass spectrometry (such as MALDI TOF, QTOF, or SELDI TOF), quantitative western blot analysis, and peptide barcoding, or a combination of two or more of the listed items. In methods, compositions, kits, and uses of some embodiments, the expression levels of genes/gene products are assessed for example by (but not limited to) cDNA chip array analysis, quantitative PCR (qPCR, such as quantitative RT PCR), microarray analysis, multiplexing, Luminex analysis, nucleic acid sequencing, northern blot analysis, comparative genomic hybridization (CGH), and/or fluorescent in situ hybridization (FISH), genomic high throughput sequencing, nanostring, massive parallel signature sequencing (MPSS), serial analysis of gene expression (SAGE), enzyme-linked immunosorbent assay (ELISA), protein sequencing, mass spectrometry (such as MALDI TOF, QTOF, or SELDI TOF), quantitative western blot analysis, and peptide barcoding, or a combination of two or more of the listed items. In some embodiments, the expression levels of the one or more gene products are assessed by detecting the presence in the samples of a polynucleotide molecule encoding the target or a portion of the polynucleotide molecule. In some embodiments, the polynucleotide molecule is a mRNA, cDNA, or functional variants or fragments thereof. Optionally, the detecting can further comprise amplifying the polynucleotide molecule. In some embodiments, the expression level of the one or more gene products is assessed by annealing a nucleic acid probe with the sample of the polynucleotide encoding the one or more targets or a portion of the polynucleotide molecule under stringent hybridization conditions. In some embodiments, the expression level of the gene products is assessed by detecting the presence in the samples of a protein of the target, a peptide, or protein fragment thereof comprising the protein. In some embodiments, the presence of the protein, peptide or protein fragment gene products is detected via mass spectrometry or using a reagent which specifically binds to the protein, peptide or protein fragment thereof. Examples of suitable reagents include, but are not limited to an antibody (as used herein, “antibody” encompasses full-length antibodies, as well as derivatives and binding fragments thereof, for example Fabs, scFvs, minibodies, diabodies, triabodies, and the like) and/or an aptamer (such as a nucleic acid or peptide aptamer). It will be appreciated that gene activity can be modulated by directly or indirectly targeting a gene product. For example, gene activity can be enhanced or increased by increasing the copy number of a gene product (or a nucleic acid encoding the gene product), by increasing the stability of a gene product (or a nucleic acid encoding the gene product), and/or by changing the location of a gene product (for example by translocating a gene product to a location where it acts, or translocating an mRNA or a ribosome). For example, gene activity can be inhibited of decreased by decreasing the copy number of a gene product (or a nucleic acid encoding the gene product), by decreasing the stability of a gene product (or a nucleic acid encoding the gene product), and/or by changing the location of a gene product (for example by sequestering a gene product or a nucleic acid encoding a gene product, or targeting a peptide gene product to a proteasome). In some embodiments, the expression level of the gene product is assessed by determining the magnitude of modulation of the activity or expression level of downstream targets of the gene product. In some embodiments, for example, an at least a 5%, 10%, 15%, or 20%, increase or an at least 5%, 10%, 15%, or 20%, decrease between the copy number, level of expression, or level of activity of the one or more downstream targets in the subject sample relative to the copy number, level of expression, or level of activity of the one or more downstream targets in a control sample indicates a level of expression of the gene product outside of the control range. In some embodiments, for example, a less-than 20%, 15%, 10%, or 5% increase or a less-than 20%, 15%, 10%, or 5% decrease between the copy number, level of expression, or level of activity of the one or more downstream targets in the subject sample relative to the copy number, level of expression, or level of activity of the one or more downstream targets in a control sample indicates a level of expression of the gene product within the control range. In methods, compositions, kits, and uses of some embodiments, expression levels of the specified different gene products are detected. For example, detection can be for example (but not limited to) any of cDNA chip array analysis, quantitative PCR (qPCR) such as quantitative RT PCR, microarray analysis, comparative genomic hybridization (CGH), fluorescent in situ hybridization (FISH), multiplexing, Luminex analysis, nucleic acid sequencing, northern blot analysis, (genomic) high throughput sequencing, nanostring, massive parallel signature sequencing (MPSS), serial analysis of gene expression (SAGE), enzyme-linked immunosorbent assay (ELISA), protein sequencing, mass spectrometry (such as MALDI TOF, QTOF, or SELDI TOF), quantitative western blot analysis, and peptide barcoding, Affymetrix arrays, GeneChip arrays, tiling arrays, anti-sense arrays, spotted DNA arrays, SNP arrays, expression arrays, or a combination thereof. In methods, compositions, kits, and uses of some embodiments, the expression levels of gene products are assessed for example (but not limited), by microarray analysis, qPCR, high-throughput sequencing, CGH, and/or FISH.

[0097] In some embodiments, an agent for detecting target mRNA, genomic DNA, or fragments thereof is a labeled nucleic acid probe capable of hybridizing to target mRNA, genomic DNA, or fragments thereof. The nucleic acid probe can be, for example, full-length target nucleic acid, or a portion thereof, such as an oligonucleotide of at least 5, 6, 7, 8, 9, 10, 15, 16, 17, 18, 19, 20, 21, 22, 23, 24, 25, 26, 27, 28, 29 30, 31, 32, 33, 34, 35, 40, 45, 50, 60, 70, 80, 90, 100, 150, 200, 250, or 500, or a range defined by any two of the preceding values (such as 10-40, 10-30, 10-25, 15-40, 15-30, 15-25, 20-40, 20-30, or 20-25) nucleotides in length and sufficient to specifically hybridize under stringent conditions well known to a skilled artisan to target mRNA or genomic DNA. Other suitable probes for use in the diagnostic assays of the disclosure are described herein. It will be appreciated that a “probe” can comprise or consist essentially of or consist of a primer of a primer pair. In some embodiments, the nucleic acid probe is designed to detect transcript variants (e.g., different splice forms) of a gene. Optionally, any nucleic acid probe as described herein can further comprise a detectable moiety, for example a fluorophore, enzyme, radiolabel, quantum dot, or a nucleic acid barcode. Examples of fluorophores include, but are not limited to xanthene dyes, e.g., fluorescein and rhodamine dyes, such as fluorescein isothiocyanate (FITC), 2-[ethylamino)-3-(ethylimino)-2-7-dimethyl-3H-xanthen-9-yl]benzoic acid ethyl ester monohydrochloride (R6G)(emits a response radiation in the wavelength that ranges from about 500 to 560 nm), 1,1,3,3,3′,3′-Hexamethylindodicarbocyanine iodide (HIDC) (emits a response radiation in the wavelength that ranged from about 600 to 660 nm), 6-carboxyfluorescein (commonly known by the abbreviations FAM and F), 6-carboxy-2′,4′,7′,4,7-hexachlorofluorescein (HEX), 6-carboxy-4′,5′-dichloro-2′,7′-dimethoxyfluorescein (JOE or J), N,N,N′,N′-tetramethyl-6-carboxyrhodamine (TAMRA or T), 6-carboxy-X-rhodamine (ROX or R), 5-carboxyrhodamine-6G (R6G5 or G5), 6-carboxyrhodamine-6G (R6G6 or G6), and rhodamine 110; cyanine dyes, e.g. Cy3, Cy5 and Cy7 dyes; coumarins, e.g., umbelliferone; benzimide dyes, e.g. Hoechst 33258; phenanthridine dyes, e.g. Texas Red; ethidium dyes; acridine dyes; carbazole dyes; phenoxazine dyes; porphyrin dyes; polymethine dyes, e.g. cyanine dyes such as Cy3 (emits a response radiation in the wavelength that ranges from about 540 to 580 nm), Cy5 (emits a response radiation in the wavelength that ranges from about 640 to 680 nm), etc; BODIPY dyes and quinoline dyes. Specific fluorophores of interest include: Pyrene, Coumarin, Diethylaminocoumarin, FAM, Fluorescein Chlorotriazinyl, Fluorescein, R110, Eosin, JOE, R6G, HIDC, Tetramethylrhodamine, TAMRA, Lissamine, ROX, Napthofluorescein, Texas Red, Napthofluorescein, Cy3, and Cy5, CalFluorOrange.

[0098] As used herein “probe” refers to a nucleic acid that hybridizes to a target nucleic acid sequence. For example, the probe may be immobilized on a substrate and may hybridize with (and capture) a target nucleic acid. For example, the probe may be part of a primer pair as described herein, or may be used for quantification in conjunction with nucleic acid amplification, for example in qPCR. For example, the probe may comprise a detectable moiety such as a fluorophore, or a fluorophore-quencher pair, such as in a TaqMan probe. In some embodiments, detection of the levels of expression of gene products (such as peptides, or RNA's such as miRNAs, non-coding RNAs, coding RNAs, and mRNAs) involves the use of a probe/primer in a polymerase chain reaction (PCR) (see, e.g., U.S. Pat. Nos. 4,683,195 and 4,683,202), such as anchor PCR or RACE PCR, or, in some embodiments, in a ligation chain reaction (LCR) (see, e.g., Landrigan et al. (1988) Science 241: 1077-1080; and Nakazawa et al. (1994) Proc. Natl. Acad. Sci. USA 91:360-364), the latter of which can be particularly useful for detecting point mutations in one or more targets gene (see Abravaya et al. (1995) Nucleic Acids Res. 23:675-682). This method can include the steps of collecting a sample of cells from a subject, isolating nucleic acid (e.g., genomic DNA, mRNA, cDNA, small RNA, mature miRNA, pre-miRNA, pri-miRNA, miRNA*, anti-miRNA, or a miRNA binding site, or a variant thereof) from the cells of the sample, contacting the nucleic acid sample with one or more primers which specifically hybridize to one or more targets gene of the disclosure, including the target genes selected from Tables 1-6, or fragments thereof, under conditions such that hybridization and amplification of the target gene (if present) occurs, and detecting the presence or absence of an amplification product, or detecting the size of the amplification product and comparing the length to a control sample. It is anticipated that PCR and/or LCR may be desirable to use as a preliminary amplification step in conjunction with any of the techniques used for detecting levels of gene products as described herein.

[0099] In some embodiments, expression levels of the specified different genes/gene products are detected. In some embodiments, detecting expression levels of the specified different genes/gene products comprises a technique selected from the group, but not limited to, consisting of cDNA chip array analysis, quantitative (RT) PCR, microarray analysis, multiplexing, Luminex analysis, nucleic acid sequencing, northern blot analysis, genomic high throughput sequencing, nanostring, massive parallel signature sequencing (MPSS), and serial analysis of gene expression (SAGE), or a combination of two or more of the listed items. Optionally, the detecting method comprises a technique selected from the group consisting of, but not limited to, enzyme-linked immunosorbent assay (ELISA), protein sequencing, mass spectrometry (such as MALDI TOF, QTOF, or SELDI TOF), quantitative western blot analysis, and peptide barcoding, or a combination of two or more of the listed items.

[0100] In some embodiments, detecting expression levels of the specified different genes/gene products comprises detecting transcript levels, detecting peptide levels, or detecting signal transduction activity for each of the specified different gene products.

[0101] In some embodiments, detecting expression levels of the specified different genes/gene products comprises contacting the sample with a probe that hybridizes to at least a portion of a transcript of a gene, the transcript comprising any of nucleotide sequences listed in Tables 3 and 4, or an antibody that binds specifically to a peptide listed in Tables 3 and 4. At least a portion of the peptide can be encoded by a nucleotide sequence selected from Tables 3 and 4, and the method can comprise for example (but not limited to), protein sequencing, mass spectrometry (such as MALDI TOF, QTOF, or SELDI TOF), or peptide barcoding.

[0102] In some embodiments, detecting expression levels of the specified different genes/gene products comprises contacting the sample with a probe that hybridizes to at least a portion of a transcript of a gene, the transcript comprising any of nucleotide sequences listed in Tables 3 and 4.

[0103] In some embodiments, detecting expression levels of the specified different genes/gene products comprises contacting the sample with an antibody that binds specifically to a peptide. At least a portion of the peptide can be encoded by a sequence selected from peptide sequences listed in Tables 3 and 4.

[0104] In some embodiments, detecting expression levels of the specified different genes/gene products comprises peptide analysis, for example (but not limited to), protein sequencing, mass spectrometry (such as MALDI TOF, QTOF, or SELDI TOF), or peptide barcoding.

[0105] In some embodiments, detecting expression levels of the specified different genes/gene products comprises one or more of contacting the sample with a probe that hybridizes to at least a portion of a transcript of a gene (the transcript comprising any of nucleotide sequences listed in Tables 3 and 4) and/or an antibody that binds specifically to a peptide (in which at least a portion of the peptide is encoded by a sequence selected from Tables 3 and 4); and/or, for example (but not limited to) protein sequencing, mass spectrometry (such as MALDI TOF, QTOF, or SELDI TOF), or peptide barcoding.

[0106] In some embodiments, detecting expression levels of the specified different genes/gene products comprises contacting the sample with at least two probes that each hybridize to at least a portion of a transcript of a gene, the transcript comprising any of nucleotide sequences listed in Tables 3 and 4, or at least two antibodies (or protein ligands) that each bind specifically to a peptide, in which at least a portion of the peptide is encoded by a sequence selected from Tables 3 and 4.

[0107] In some embodiments, detecting expression levels of the specified different genes/gene products comprises contacting the sample with at least two probes that each hybridize to at least a portion of a transcript of a gene or the reverse complement thereof, the transcript comprising any of nucleotide sequences listed in Tables 3 and 4.

[0108] In some embodiments, detecting expression levels of the specified different genes/gene products comprises contacting the sample with at least two antibodies (or protein ligands) that each bind specifically to a peptide, in which at least a portion of the peptide is encoded by a sequence selected from Tables 3 and 4.

[0109] In some embodiments, detecting expression levels of the specified different genes/gene products comprises contacting the sample with at least 6, 7, 8, 9, 10, 11, 12, 13, 14, 15, 16, 17, 18, 19, 25, 30, or 35 but no more than 40 (or 20 or 15 or 14) probes that each hybridize to at least a portion of a gene product (such as a transcript of a gene) comprising any of nucleotide sequences listed in Tables 3 and 4; and/or at least 2, 3, 4, 5, 6, 7, 8, 9, 10, 11, 12, 13, 14, 15, 16, 17, 18, 19, 20, 25, 30, or but no more than 40 (or 20 or 15 or 14) antibodies (or protein ligands) that each bind specifically to a peptide, wherein at least a portion of the peptide is encoded by a sequence selected from Tables 3 and 4.

[0110] In some embodiments, detecting expression levels of the specified different genes/gene products comprises contacting the sample with at least 6, 7, 8, 9, 10, 11, 12, 13, 14, 15, 16, 17, 18, 19, 25, 30, or 35 but no more than 40 (or 20 or 15 or 14) probes that each hybridize to at least a portion of gene product (such as a transcript of a gene), comprising any of nucleotide sequences listed in Tables 3 and 4.

[0111] In some embodiments, detecting expression levels of the specified different genes/gene products comprises contacting the sample with at least 6, 7, 8, 9, 10, 11, 12, 13, 14, 15, 16, 17, 18, 19, 25, 30, or 35 but no more than 40 (or 20 or 15 or 14) antibodies (or protein ligands) that each bind specifically to a peptide, wherein at least a portion of the peptide is encoded by a sequence selected from Tables 3 and 4.

[0112] In some embodiments, detecting expression levels of the specified different genes/gene products comprises contacting the sample with (a) for a female subject, a set of at least 6, but no more than 60 (for example, 6-14, 6-15, 6-20, 6-25, 6-30, 6-35, 6-40, 6-50, 6-60, 8-14, 8-15, 8-20, 8-25, 8-30, 8-35, 8-40, 8-50, 8-60, 9-10, 9-14, 9-15, 9-16, 9-20, 9-40, 9-50, 9-60, 10-14, 10-15, 10-20, 10-25, 10-10-35, 10-40, 10-50, or 10-60) different nucleic acid probes that each hybridize to at least a portion of a gene product (such as a transcript of a gene) comprising any of nucleotide sequences listed in Table 3, (b) for a male subject, a set of at least 6, but no more than 40 (for example, 6-14, 6-15, 6-20, 6-25, 6-30, 6-35, 6-40, 8-14, 8-15, 8-20, 8-25, 8-30, 8-35, 8-40, 9-10, 9-14, 9-15, 9-16, 9-20, 9-40, 10-14, 10-20, 10-25, 10-30, 10-35, or 10-40) different nucleic acid probes and/or primer pairs that each hybridize to at least a portion of a transcript of a gene or the reverse complement thereof, the transcript comprising any of nucleotide sequences listed in Table 4, (c) for a female subject, a set of at least 6, but no more than 12 (for example, 6-12, 6-10, 6-8, 8-12, 8-10, or 10-12) different antibodies (or protein ligands) that each bind specifically to a peptide encoded by sequences selected from Table 3, and/or (d) for a male subject, a set of at least 14, but no more than 20 (or a set of no more than 15) different antibodies (or protein ligands) that each bind specifically to a peptide encoded by sequences selected from Table 4. In some embodiments, the same numerical range of gene products is detected for male and female subjects.

[0113] In some embodiments, for a female subject, detecting expression levels of the specified different genes/gene products comprises contacting the sample with a set of at least 6, but no more than 30, or 20 different nucleic acid probes and/or primer pairs that each hybridize to at least a portion of a transcript of a gene or the reverse complement thereof, the transcript comprising any of nucleotide sequences listed in Tables 3.

[0114] In some embodiments, fora male subject, detecting expression levels of the specified different genes/gene products comprises contacting the sample with a set of at least 10, but no more than 40, 30, or 20 different nucleic acid probes and/or primer pairs that each hybridize to at least a portion of a transcript of a gene or the reverse complement thereof, the transcript comprising any of nucleotide sequences listed in Table 4.

[0115] In some embodiments, for a female subject, detecting expression levels of the specified different genes/gene products comprises contacting the sample with a set of at least 10, but no more than 40, 30, or 20 different antibodies (or protein ligands) that each bind specifically to a peptide encoded by sequences selected from Table 3.

[0116] In some embodiments, fora male subject, detecting expression levels of the specified different genes/gene products comprises contacting the sample with set of at least 6, 7, 8, 9, 10, 11, 12, 13, 14, 16, 17, 18, 19, 20, 25, 30, or 35 but no more than 40 different antibodies that each bind specifically to a peptide encoded by sequences selected from Table 4. In some embodiments, for a male subject, detecting expression levels of the specified different genes/gene products comprises contacting the sample with set of at least 6, 7, 8, 9, 10, 11, 12, 13, 14, 15, 16, 17, 18, 19, 20, 25, 30, or 35 but no more than 40 different antibodies (or protein ligands) that each bind specifically to a peptide encoded by sequences selected from Table 4.

[0117] In some embodiments, for a female subject, detecting expression levels of the specified different genes/gene products comprises contacting the sample with one or more of a set of at least 6, 7, 8, 9, 10, 11, 12, 13, 14, 15, 16, 17, 18, 19, 20, 25, 30, or 35 but no more than 40 different nucleic acid probes (for example, a part of primer pairs, or for capture on an array) that each hybridize to at least a portion of a transcript of a gene or the reverse complement thereof, the transcript comprising any of nucleotide sequences listed in Table 3, and/or a set of at least 6, 7, 8, 9, 10, 11, 12, 13, 14, 15, 16, 17, 18, 19, 20, 25, 30, or 35 but no more than 40 different antibodies (or protein ligands) that each bind specifically to a peptide encoded by sequences selected from Table 3.

[0118] In some embodiments, fora male subject, detecting expression levels of the specified different genes/gene products comprises contacting the sample with one or more of a set of at least 10, 11, 12, 13, 14, 15, 16, 17, 18, 19, or 20 but no more than 40 different nucleic acid probes and/or primer pairs that each hybridize to at least a portion of a transcript of a gene or the reverse complement thereof, the transcript comprising any of nucleotide sequences listed in Table 4, and/or a set of at least 10, 11, 12, 13, 14, 15, 16, 17, 18, 19, or 20, but no more than 40 different antibodies (or protein ligands) that each bind specifically to a peptide encoded by sequences selected from Table 4. In some embodiments, for a male subject, detecting expression levels of the specified different genes/gene products comprises contacting the sample with one or more of a set of at least 8, 9, 10, 11, 12, 13, or 14, but no more than different nucleic acid probes and/or primer pairs that each hybridize to at least a portion of a transcript of a gene or the reverse complement thereof, the transcript comprising any of sequences selected from Table 4, and/or a set of at least 8, 9, 10, 11, 12, 13, or 14, but no more than 15 different antibodies (or protein ligands) that each bind specifically to a peptide encoded by sequences selected from Table 4.

[0119] In some embodiments, for a female subject, detecting expression levels of the specified different genes/gene products comprises contacting the sample with a set of at least 6, 7, 8, 9, 10, or 11, but no more than 12 (for example, 6-12, 6-10, 6-8, 8-12, 8-10, or 10-12) different nucleic acid probes and/or primer pairs that each hybridize to at least a portion of a transcript of a gene or the reverse complement thereof, the transcript comprising any of nucleotide sequences listed in Table 3. Optionally, detecting expression levels of the specified different genes/gene products comprises contacting the sample with a set of at least 6, 7, 8, 9, 10, 11, or 12, but no more than 12 (for example, 6-12, 6-10, 6-8, 8-12, 8-10, or 10-12) different antibodies (or protein ligands) that each bind specifically to a peptide encoded by sequences selected from Table 3.

[0120] In some embodiments, fora male subject, detecting expression levels of the specified different genes/gene products comprises contacting the sample with a set of at least 10, 11, 12, 13, 14, 15, 16, 17, 18, or 19, but no more than 20 (or no more than 15) different nucleic acid probes and/or primer pairs that each hybridize to at least a portion of a transcript of a gene or the reverse complement thereof from Tables 2, 4, and 6. Optionally, detecting expression levels of the specified different genes/gene products comprises contacting the sample with a set of at least 10, 11, 12, 13, 14, 15, 16, 17, 18, or 19, but no more than 20 (or no more than 15) different antibodies (or protein ligands) that each bind specifically to a peptide encoded by sequences selected from Tables 2, 4, and 6.

Subjects Having or at Risk of Having Conditions Comprising Neoangiogenesis and/or Ischemia

[0121] As used herein, a subject is referred to a mammal, including, for example, a murine, porcine, bovine, equine, canine, and/or feline mammals. In some embodiments, a subject is a non-human primate. In some embodiments, the subject is a human. In some embodiments, the subject is a healthy subject. In some embodiments, the subject is a mammal with a cardiac disease or a cardiovascular condition. In some embodiments the subject is a mammal at risk of having a cardiac disease or a cardiovascular condition. In some embodiments, the subject is at risk of ischemia. In some embodiments, the subject is a mammal with a cardiovascular condition characterized by perfusion shortage, or at a risk thereof. In some embodiments, the subject has a cardiac disease. In some embodiments the subject has a disease, or a cardiovascular condition characterized by oxygen insufficiency related to a cardiovascular event.

[0122] It is contemplated that methods, compositions, kits, and uses of embodiments herein can be used to detect any art-recognized condition comprising neoangiogenesis or ischemia or the risk thereof. Additionally, methods, compositions, kits, and uses comprising a therapeutic compound and/or medical intervention as described herein can be used to inhibit, ameliorate, delay the onset of, reduce the likelihood of, treat, or prevent any art-recognized condition comprising neoangiogenesis or ischemia.

[0123] In certain embodiments, a subject may be diagnosed with one of the diseases or conditions listed here. Alternatively, a subject may be given an output/report that the subject is at risk of having one of the diseases or conditions listed herein. “Disease” and “condition” comprising perfusion shortage are used interchangeably herein. Examples of conditions (or diseases) comprising perfusion shortage include ischemic diseases (such as for example (but not limited to) cardiovascular ischemic disease such as angina pectoris, silent myocardial ischemia, microvascular cardiovascular disease, myocardial infarction, TIA, stroke, minimal vessel dementia, peripheral artery disease) and disease with a perfusion component (for example (but not limited to), cancer, diabetes, and ophthalmologic diseases). By way of example, cancer can comprise perfusion components such as tumor vascularization and/or hematological or lymphogenic metastasis (and thus can be characterized as a disease comprising a perfusion shortage or deficiency and neoangiogenesis (tumor angiogenesis)). By way of example, diabetes, in which there can be challenges in providing blood to the extremities can be characterized as a perfusion shortage or retinal neoangiogenesis. By way of example, ophthalmologic conditions for example (but not limited to) retinal neoangiogenesis can be characterized as a neoangiogenesis. By way of example, gynecological conditions such as placental buildup during a menstrual cycle can be characterized as a perfusion shortage. Accordingly, examples of conditions or diseases comprising perfusion shortage include, but are not limited to, ischemic cardiovascular disease, microangiopathy in cardiovascular disease (such as diastolic heart failure), hypertrophic cardiomyopathy, cardiovascular pathology with relative ischemia (such as hypertrophic CMP, ischemic heart failure, and/or congenital cardiac disease), myocardial infarction, ischemic cerebrovascular disease (including CVA/TIA, and/or vascular dementia), ischemic peripheral artery disease, venous disease, orthopedic disease, sepsis, inflammation, lymphatic disease, ophthalmological disease associated with ischemia and/or neoangiogenesis (such as neoangiogenesis in retinopathy), diabetic macro- and microangiopathy, oncological pathology (including solid tumors (tumor angiogenesis), metastatic disease), endothelial dysfunction in cardiovascular and peripheral artery disease, ophthalmology (such as neoangiogenesis in retinopathy), diabetic macro- and microangiopathy, oncological pathology (such as solid tumors and/or metastatic disease), endothelial dysfunction in cardiovascular and peripheral artery disease, nephrological disease associated with ischemia and/or neoangiogenesis, gynecological disease, orthopedic disease, lung disease (for example (but not limited to) COPD, emphysema, lung fibrosis, cystic fibrosis, lung cancer, pulmonary interstitial disease, and/or monitoring pre- and post-lung transplantation, pulmonary emboli), cerebrovascular disease (for example, stroke, TIA, microvascular dementia), and emboli (such as pulmonary emboli, deep venous thrombosis), inadequate ventilation/oxygenation of a mechanically ventilated subject, inflammatory disease, auto-immune disease (with an ischemic component) or gastrointestinal disorders (for example (but not limited to) Crohn's disease, colitis ulcerosa), neurodegenerative disease (for example (but not limited to) Parkinson's disease or multiple sclerosis), erectile dysfunction, sport injury, frailty, shock, post-reanimation, and post-resuscitation, or a combination of two or more of the listed items. In some embodiments, the condition comprising perfusion shortage comprises a diseases or processes related to vascular remodeling including, but not limited to, arterial and venous diseases, as well as diseases related to lymphangiogenic disease, or vascular remodeling including (but not limited to) lymphangiogenic metastatic disease, arteriovenous malformation, arterial remodeling, and/or venous thrombosis, and/or placental development (e.g., to monitor menstrual cycle). In some embodiments, the disease or condition comprising perfusion shortage comprises (but not limited to) ischemic cardiovascular disease, microangiopathy in cardiovascular disease (such as diastolic heart failure), hypertrophic cardiomyopathy, cardiovascular pathology with relative ischemia (such as hypertrophic CMP, ischemic heart failure, and/or congenital cardiac disease), ischemic cerebrovascular disease (including CVA/TIA, and/or vascular dementia), ischemic peripheral artery disease, venous disease, orthopedic disease, sepsis, inflammation, lymphatic disease, ophthalmological disease associated with ischemia and/or neoangiogenesis (such as neoangiogenesis in retinopathy), diabetic macro and microangiopathy, oncological pathology (including solid tumors, metastatic disease), endothelial dysfunction in cardiovascular and peripheral artery disease, ophthalmology (such as neoangiogenesis in retinopathy), diabetic macro and microangiopathy, oncological pathology (such as solid tumors and/or metastatic disease), endothelial dysfunction in cardiovascular and peripheral artery disease, nephrological disease associated with ischemia and/or neoangiogenesis, gynecological disease, orthopedic disease, lung disease (such as COPD, emphysema, lung fibrosis, cystic fibrosis, lung cancer, pulmonary interstitial disease, and/or monitoring pre- and post-lung transplantation, pulmonary emboli), cerebrovascular disease (for example, stroke, TIA, microvascular dementia), and emboli (such as pulmonary emboli, deep venous thrombosis), inadequate ventilation/oxygenation of a mechanically ventilated subject, inflammatory disease and/or auto-immune disease (with an ischemic component) or gastrointestinal disorder (including (but not limited to) Crohn's disease, Colitis Ulcerosa), neurodegenerative disease (including (but not limited to) Parkinson's disease or multiple sclerosis), erectile dysfunction, sport injury, frailty, shock (such as post-resuscitation shock), arterial and venous diseases, disease related to lymphangiogenic disease, vascular remodeling including lymphangiogenic metastatic disease, arteriovenous malformation, arterial remodeling, or venous thrombosis, or a combination of two or more of any of the listed items.

[0124] In the method of some embodiments, the condition comprising perfusion shortage is selected from the group consisting of ischemic cardiovascular disease, microangiopathy in cardiovascular disease (such as diastolic heart failure), hypertrophic cardiomyopathy, cardiovascular pathology with relative ischemia (such as hypertrophic CMP, ischemic heart failure, and/or congenital cardiac disease), ischemic cerebrovascular disease (including CVA/TIA, and/or vascular dementia), ischemic peripheral artery disease, venous disease, orthopedic disease, sepsis, inflammation, lymphatic disease, ophthalmological disease associated with ischemia and/or neoangiogenesis (including (but not limited to) neoangiogenesis in retinopathy), diabetic macro and microangiopathy, oncological pathology (including solid tumors, metastatic disease), endothelial dysfunction in cardiovascular and peripheral artery disease, ophthalmology (such as neoangiogenesis in retinopathy), diabetic macro and microangiopathy, oncological pathology (including (but not limited) solid tumors and/or metastatic disease), endothelial dysfunction in cardiovascular and peripheral artery disease, nephrological disease associated with ischemia and/or neoangiogenesis, gynecological disease, orthopedic disease, lung disease (including (but not limited to) COPD, emphysema, lung fibrosis, cystic fibrosis, lung cancer, pulmonary interstitial disease, and/or monitoring pre- and post-lung transplantation), pulmonary emboli or deep venous thrombosis), cerebrovascular disease (including (but not limited to), stroke, TIA, microvascular dementia, and emboli such as pulmonary emboli), deep venous thrombosis, inadequate ventilation/oxygenation of a mechanically ventilated subject, inflammatory disease and/or auto-immune disease (with an ischemic component), gastrointestinal disorders (including (but not limited) Crohn's disease, colitis ulcerosa), neurodegenerative disease (including (but not limited) Parkinson's disease or multiple sclerosis), erectile dysfunction, sport injury, frailty, shock (such as post-resuscitation shock), arterial and venous diseases, disease related to lymphangiogenic disease, vascular remodeling including lymphangiogenic metastatic disease, arteriovenous malformation, arterial remodeling, or venous thrombosis, or a combination of two or more of the listed items.

[0125] In some embodiments, the condition comprising perfusion shortage comprises cardiovascular pathology with relative or absolute ischemia comprises congenital disease with significant or persistent shunting, such as open foramen ovale, ductus botalli, and/or ventricular shunt, or Eisenmenger syndrome/disease.

[0126] In some embodiments, the condition comprising perfusion shortage comprises relative or absolute ischemia. Without being limited by theory, ischemia can refer to decreased supply of oxygen and/or increased demand for oxygen. In some embodiments, ischemia due to increased demand for oxygen may occur due to, for instance, due to hypertrophy, inflammation or increased metabolism or sepsis

[0127] In some embodiments, the relative ischemia comprises cardiovascular disease with an increased demand for oxygen for instance but not limited to hypertrophic myocardium or and local and/or systemic increased oxygen demand (including but not limited to inflammation).

[0128] In some embodiments, a subject has at least one risk factor for having a condition comprising perfusion shortage, wherein said risk factor is selected from the group consisting of high blood pressure; glucose intolerance; family history of cardiovascular disease, hypercholesterolemia, or dyslipidemia; aging; smoking; physical inactivity; obesity; previous cardiovascular disease; diagnosis of diabetes mellitus, kidney disease, peripheral artery disease, or metabolic syndrome; gender; high low density lipoprotein (LDL) level; high cholesterol level; and specific DNA polymorphism associated with higher cardiovascular risk.

### Medical Monitoring and Intervention

[0129] In some embodiments, the method further comprises correlating the detected levels of the specified different gene products to a severity of the condition comprising perfusion shortage or a likelihood of developing the condition, thereby ascertaining a severity or risk of the condition. The correlating can be used to quantify the condition or the risk of the condition. By way of example, if the condition comprising perfusion shortage is present, or there is a risk of the condition, the subject can be recommended for a medical intervention or an invasive or resource-intensive monitoring as described herein (e.g., invasive angiography, advanced imaging, nuclear imaging, MSCT, MRI analysis, or tissue biopsy)) as described herein. Example medical interventions include, but are not limited to, initiation or modulation of pharmacotherapy or anti-ischemic medical intervention (including (but not limited to) percutaneous and/or surgical revascularization), and/or modulating the local (or general) perfusion and oxygenation. In some embodiments, the medical intervention is provided to the subject. In some embodiments, the subject receives the medical intervention. In some embodiments, the correlating can be performed after a medical intervention, for example to determine efficacy of the medical intervention, monitor disease progression, and/or to select further medical management or medical interventions.

[0130] In some embodiments, the method further comprises identifying a previous condition comprising perfusion shortage (such as an ischemic or neoangiogenesis episode), diagnosing the subject as having the condition, determining the subject to be at risk of the condition, prognosticating an outcome in the subject, predicting a response of the subject to a medical intervention or pharmacotherapy, selecting a medical intervention for the subject (for example, by way of a surrogate marker), selecting a dose and/or frequency of a medical intervention, validating a candidate medical intervention, measuring a response to a candidate medical intervention, measuring and monitoring a subject's ischemic disease progression or remission, and/or monitoring a subject's response to a medical intervention or pharmacotherapy based on the detected levels of the specified different gene products. For example, levels of the specified gene products outside of (e.g., exceeding the upper limit of) the control ranges can indicate that the subject has the condition, or is at risk for the condition.

[0131] In some embodiments, the method comprises recommending the subject for an anti- or pro-ischemic medical intervention and/or anti- or pro-neoangiogenesis medical intervention or the modification of the therapy when the expression levels of the specified different gene products are outside of the control ranges. Any suitable surgical and/or percutaneous procedure to treat a condition comprising ischemia and/or neoangiogenesis is contemplated. The medical intervention can be one that is approved by, and/or meets guidelines set by a local health specialist organisation, or by a professional or government organization, for example the Food and Drug Administration, or the European Medicines Agency.

[0132] In some embodiments, the method comprises providing an assessment of a severity of said subject's perfusion shortage, based on the output. In some embodiments, the output further comprises providing a prognosis report of said subject's perfusion shortage. In some embodiments, providing a prognosis report may be based on the determination of expression levels of two or more genes (nucleotide or protein biomarkers) from a plurality of the identified genes (nucleotide or protein biomarkers) described herein. In some embodiments, providing a prognosis report may be based on the determination of expression levels of two or more genes (nucleotide or protein biomarkers) from a plurality of the identified genes (nucleotide or protein biomarkers) that are specific for a female in case the subject is a female. In some embodiments, providing a prognosis report may be based on the determination of expression levels of two or more genes (nucleotide or protein biomarkers) from a plurality of the identified genes (nucleotide or protein biomarkers) that are specific for a male in case the subject is a male. In some embodiments, providing a prognosis report may be based on the determination of expression levels of two or more genes (nucleotide or protein biomarkers) from a plurality of the identified genes (nucleotide or protein biomarkers) that are specific for a male or a female in case the subject is a male or a female respectively, depending on the degree of difference of the expression levels of said two or more genes (nucleotide or protein biomarkers) in the subject with respect to a control value.

[0133] In some embodiments, a control value is the respective value in a control for example, an individual of the same gender as the subject, without a cardiovascular risk of having ischemia. A control value may be a baseline value for the level of each of the two or more genes in the subject prior to a cardiovascular event in the subject.

[0134] In some embodiments, said output may further comprise providing a response report of said subject upon, during, and/or after a medical intervention or modulation of pharmacotherapy. In some embodiments, said output may further comprise providing a monitoring report. The monitoring report may comprise monitoring the subject before or after receiving a medical intervention or modulation of pharmacotherapy. In some embodiments, the monitoring may occur periodically from the date of obtaining the samples to generate the output, and continue for a variable period of time, or as determined by a medical practitioner. In some embodiments, the monitoring may occur periodically for 2 months or more, for 4 months or more for 6 months or more, for 8 months or more, for 10 months or more, for 12 months or more for 14 months or more, for 16 months or more, for 18 months or more, for 20 months or more, for 22 months or more, or for 24 months, or more from the time the date of obtaining the samples to generate the output. In some embodiments, the monitoring may occur periodically for 36 months or more. In some embodiments, the monitoring may occur periodically for 48 months or more.

[0135] In some embodiments, the monitoring may occur once every 2 weeks, or once every 3 weeks, or once every 4 weeks, or once every 6 weeks, or once every 8 weeks, or once every 10 weeks, or once every 12 weeks, or once every 14 weeks, or once every 16 weeks, or once every 18 weeks, or once every 20 weeks, or once every 22 weeks, or once every 24 weeks.

[0136] In some embodiments, the method further comprises providing a treatment to said subject, wherein said subject has or is at risk of having a condition comprising perfusion shortage, at least in part based on said output. In some embodiments, providing a treatment comprises administering an anti- or pro-ischemic medical intervention and/or anti- or pro-neoangiogenesis medical intervention, and/or additional diagnostic analysis (e.g., biopsy) to the subject (or recommending administering an anti- or pro-ischemic medical intervention and/or anti- or pro-neoangiogenesis medical intervention, and/or additional diagnostic analysis (e.g., biopsy) to the subject) when the expression levels of the specified different gene products are outside of the control ranges. For example, in some embodiments, if the expression levels of the specified different gene products exceed the control ranges, and an anti-ischemic medical intervention or anti-neoangiogenesis medical intervention is provided.

[0137] In the method of some embodiments, the medical intervention comprises pharmacotherapy, radiotherapy or a surgical or percutaneous procedure, or a combination of two or more of the listed items. In the method of some embodiments, the medical intervention targets one or more of the at least two specified different gene products. In the method of some embodiments, the medical intervention or pharmacotherapy comprises (but is not limited to) an anti-ischemic medical intervention, for example a beta-blocker, a calcium antagonist, nitrates, thrombolysis, thrombectomy, bypass surgery, or a percutaneous coronary procedure. In some embodiments, the medical intervention comprises administering a pharmaceutical composition including but not limited to beta-blockers, calcium channels antagonists, nitrates, aspirin, cholesterol-lowering compounds, angiotensin-converting enzyme (ACE) inhibitors, and ranolazine. In some embodiments, the medical intervention comprises administering a pharmaceutical composition selected from the group consisting of (but not limited to) beta-blockers, calcium channels antagonists, nitrates, aspirin, cholesterol-lowering compounds, angiotensin-converting enzyme (ACE) inhibitors, and ranolazine. In some embodiments, the medical intervention comprises (but not limited to) one or more of atenolol, nadolol, metoprolol, propranolol, carteolol, carvedilol, labetolol, oxprenolol, penbutolol, sotalol, timolol, benazepril, captopril, cilazapril, enalapril, cnalaprilat fosinopril, iiriidapril, lisinopril, perindopril, quinapril, ramipril, trandolapril, candesartan, eprosartan irbesartan, losartan, elmesartan, telmisartan, valsartan, aspirin, diclofenae; diflunisal, etodolac, fenoproferi, flurbiprofen, ibuprofen, indomethaein, ketoprofen; Ketorolac, meclofenamate, mefenamic acid, meloxicam, naburnetone, naproxen, oxaprozin, piroxicani, salsalate, sulindac, tolmetin, a COX-2 inhibitor (comprises celecoxib rofecoNib, etoricoxib, valdecoxib, pareeoxib, meloxicarn or luniracoxib), ranolazine, nitrates, such as isosorbide mononitrate, isosorbide dinitrate (ISDN), andarine, ethylestrenol, mesterolone, methandrostenolone, methenolone, methyltestosterone, oxandrolone, oxymetholone stanozolol, boldenone, hexoxymestrolum, methandrostenolone, methenolone enanthate, nandrolone decanoate, nandrolone phenproprionate, stanozolol, stenbolone, testosterone cypionate, testosterone enanthate, testosteron, testosterone nicotinate, therobolin, trenbolone, trenbolone, trophobolene, a natural oil or fatty acid, e.g., comprising an omega-3 fatty acid, a fish oil, a long-chain polyunsaturated fatty acid, an n-3 and/or n-6 highly unsaturated fatty acid, eicosapentaenoic acid (EPA), docosaltexaenoic acid (DHA), calcium channel blocker, such as Nifidipine, Amlodipine, Felodipine, Nieardipine, Nisoldipine, Verapamil, or a combination thereof in some embodiments, the pharmaceutical composition may be packaged for administration intravenously, topically, orally, by inhalation, by infusion, by injection, intraperitoneally, intramuscularly, subcutaneously, intra-aurally, for intra-articular administration, for intra-mammary administration, for topical administration or for absorption through epithelial or mucocutaneous linings.

[0138] In the method of some embodiments, the medical intervention comprises a modulator of nucleic acid or protein expression comprising at least one of nucleotide or peptide sequences listed in Tables 3 and 4. In some embodiments, the medical intervention can target one or more genes (nucleotide or protein targets) listed in Tables 1-6. In some embodiments, the medical intervention may comprise a protein, a small molecule or a nucleic acid that can modulate the expression of the target genes comprising one or more genes (nucleotide or protein targets) listed in Tables 1-3.

[0139] In the method of some embodiments, the medical intervention comprises modulating the function of a gene listed in Tables 1-6. For example, modulating can comprise inhibiting the function of the gene product or enhancing the function of the gene product. Inhibiting (or reducing) can comprise, for example, (but not limited to) inhibiting transcription or translation, destabilizing or degrading a nucleic acid encoding the gene product or the gene product itself, changing the location of a nucleic acid encoding the gene product or the gene product itself, or forming a complex with the gene product. Enhancing (or increasing) can comprise, for example (but not limited to), inducing or increasing transcription or translation, stabilizing a nucleic acid encoding the gene product or the gene product itself, changing the location of a nucleic acid encoding the gene product or the gene product itself, or forming a complex with the gene product.

[0140] In some cases, the medical intervention comprises using nucleotides or peptides listed in Tables 3 and 4 or nucleotides or peptides derived from genes listed in Tables 1-6 as therapeutic targets. Suitable technologies may be used to direct to these therapeutic targets to modulate gene functions.

[0141] In some embodiments, the method further comprises ceasing or modulating the medical intervention and/or monitoring (or recommending ceasing or modulating the medical intervention and/or monitoring) when the expression levels of the specified different gene products are within the control ranges. For example, modulating can comprise adaptation of dose or frequency, or change of pharmacotherapy/intervention. It is contemplated that some kinds of patient monitoring can be invasive and/or resource-intensive (which, for shorthand, may collectively be referred to as “invasive monitoring”). Therefore, it can be advantageous to use methods, compositions, kits and uses as described herein to determine that the subject is at-risk before performing more invasive or resource-intensive analysis. In the method, composition, kit, or use of some embodiments, the invasive or resource-intensive monitoring comprises (but is not limited to) invasive angiography, advanced imaging, nuclear imaging, MSCT, MRI analysis, tissue biopsy, or monitoring of mechanical ventilation. Accordingly, in some embodiments, the method comprises determining the subject to be at risk for the condition, and further comprises invasive or resource-intensive monitoring after the subject has been determined to be at-risk. For example, in some embodiments, monitoring is performed for adequate ventilation and oxygenation of a mechanically ventilated patient, such as a patient in the CCU, ICU, and/or during surgery. In the method, composition, kit, or use of some embodiments, detecting a condition comprising perfusion shortage (or risk thereof) as described herein can be used in combination with a therapy for a condition comprising perfusion shortage as for example, a companion diagnostic. By way of example, the companion diagnostic can be used as a “gatekeeper” assay for the initiation of therapy, for modulation of therapy (e.g., reduction or increase of dose and/or frequency), efficacy analysis, and to monitor disease progression and remission. Accordingly, in some embodiments, the method of detecting a condition comprising perfusion shortage (or risk thereof) comprises determining whether or not to initiation therapy (based on whether the subject has or is at risk of a condition comprising perfusion shortage), for modulation of therapy (e.g., reduction or increase of dose and/or frequency), efficacy analysis, and to monitor disease progression.

[0142] In some embodiments, the subject may be monitored for, in addition to the monitoring aspects contemplated in the preceding sections, a condition or an event related to any one or more of: a trauma, condition or disease comprising: a chronic Systemic inflammatory Response State (SIRS); chronic systemic inflammatory stress; burns, chronic obstructive pulmonary disease; congestive heart failure; chronic kidney disease; surgery; cancer (and cancer metastasis (hematologic or lymphogenic metastasis); sepsis; ageing; acute respiratory distress syndrome; acute lung injury; infection; a CNS disorder or injury; anemia; immunosuppression; insulin resistance; anorexia; anxiety; sleep disturbances; weakness; fatigue; gastrointestinal distress; sleep disturbances; wake disturbances; pain; listlessness; shortness of breath; lethargy; depression; malaise; or, a combination thereof. In one embodiment, the trauma, condition or disease comprises a maladaptive nutritional state secondary to the SIRS. In one embodiment, the maladaptive nutritional state comprises cachexia, and optionally the cachexia comprises cachexia secondary to cancer. In one embodiment, the CNS disorder comprises Parkinson's disease or Alzheimer's disease. In some embodiments, at least based in part on response report, prognosis report, or both, further comprising ceasing said medical intervention or pharmacotherapy.

### Kits

[0143] In some embodiments, a kit is described. The kit can comprise (i) at least two different nucleic acid probes that hybridize to a portion of a transcript comprising sequences selected from Tables 3 and 4 or a reverse complement thereof, in which each of the nucleic acid probes comprises a different detectable moiety; and/or (ii) at least two different antibodies (or protein ligands) that each binds specifically to a peptide, in which at least a portion of the peptide is encoded by a sequence selected from Tables 3 and 4. In some embodiments, the kit consists essentially of or consists of (i) at least 2, 3, 4, 5, 6, 7, 8, 9, 10, 11, 12, 13, 14, 15, 16, 17, 18, or 19 different nucleic acid probes that hybridize to a portion of a transcript comprising sequences selected from Tables 3 and 4, or (ii) at least 2, 3, 4, 5, 6, 7, 8, 9, 10, 11, 12, 13, 14, 15, 16, 17, 18, or 19 different antibodies (or protein ligands) that each binds specifically to a peptide, in which at least a portion of the peptide is encoded by a sequence selected from Tables 3 and 4. In some embodiments, the kit consists essentially of or consists of (i) at least 2, 3, 4, 5, 6, 7, 8, 9, 10, 11, 12, 13, 14, 15, 16, 17, 18, or 19, but no more than 60 different nucleic acid probes that hybridize to a portion of a transcript comprising sequences selected from Tables 3 and 4, or (ii) at least 2, 3, 4, 5, 6, 7, 8, 9, 10, 11, 12, 13, 14, 15, 16, 17, 18, or 19, but no more than 60 different antibodies (or protein ligands) that each binds specifically to a peptide, in which at least a portion of the peptide is encoded by a sequence selected from Tables 3 and 4. In some embodiments, the kit consists essentially of or consists of (i) at least 2, 3, 4, 5, 6, 7, 8, 9, 10, 11, 12, 13, 14, 15, 16, 17, 18, or 19, but no more than 40 different nucleic acid probes that hybridize to a portion of a transcript comprising sequences selected from Tables 3 and 4, or (ii) at least 2, 3, 4, 5, 6, 7, 8, 9, 10, 11, 12, 13, 14, 15, 16, 17, 18, or 19, but no more than 40 different antibodies (or protein ligands) that each binds specifically to a peptide, in which at least a portion of the peptide is encoded by a sequence selected from Tables 3 and 4. In some embodiments, the kit consists essentially of or consists of (i) at least 2, 3, 4, 5, 6, 7, 8, 9, 10, 11, 12, 13, 14, 15, 16, 17, 18, or 19, but no more than 20 different nucleic acid probes that hybridize to a portion of a transcript comprising sequences selected from Tables 3 and 4. As described herein, a probe may be part of a primer pair, may be for quantifying amplicons in nucleic acid amplification, and/or may be for capturing a nucleic acid on a substrate. In some embodiments, the kit consists essentially of or consists of (ii) at least 2, 3, 4, 5, 6, 7, 8, 9, 10, 11, 12, 13, 14, 15, 16, 17, 18, or 19, but no more than 20 different antibodies (or protein ligands) that each binds specifically to a peptide, in which at least a portion of the peptide is encoded by a sequence selected from Tables 3 and 4. In some embodiments, the kit consists essentially of or consists of (i) at least 2, 3, 4, 5, 6, 7, 8, 9, 10, 11, 12, 13, 14, 15, 16, 17, 18, or 19, but no more than 20 different nucleic acid probes that hybridize to a portion of a transcript comprising sequences selected from Tables 3 and 4, or (ii) at least 2, 3, 4, 5, 6, 7, 8, 9, 10, 11, 12, 13, 14, 15, 16, 17, 18, or 19, but no more than 20 different antibodies (or protein ligands) that each binds specifically to a peptide, in which at least a portion of the peptide is encoded by a sequence selected from Tables 3 and 4. In some embodiments, nucleic acid probes that hybridize to a portion of a transcript comprising sequences selected from Tables 3 and 4 represent at least 50% of the total unique nucleic acid probes in the kit, for example, at least 50%, 60%, 70%, 80%, 90%, 95% or 100% of the unique nucleic acid probes in the kit. In some embodiments nucleic acid probes that hybridize to a portion of a transcript comprising sequences selected from Tables 3 and 4 represent at least 50% of the total unique nucleic acid probes in the kit, for example, at least 50%, 60%, 70%, 80%, 90%, 95% or 100% of the unique nucleic acid probes in the kit. In some embodiments, antibodies (or protein ligands) that each bind specifically to a peptide, in which at least a portion of the peptide is encoded by a sequence selected from Tables 3 and 4, represent at least 50% of the total unique antibodies (or protein ligands) in the kit, for example, at least 50%, 60%, 70%, 80%, 90%, 95% or 100% of the unique antibodies (or protein ligands) in the kit. In some embodiments, the kit can be for use in any of the methods described herein.

[0144] In some embodiments, the kit comprises at least two different nucleic acid probes or primer pairs that hybridize to a portion of a transcript comprising sequences selected from Tables 3 and 4 or a reverse complement thereof. Each of the nucleic acid probes can comprise a different detectable moiety, for example a fluorophore, a quantum dot, a radiolabel, or an enzyme. In some embodiments, a probe of the kit is a primer of a primer pair as described herein.

[0145] In some embodiments, the kit comprises at least two different antibodies (or protein ligands) that each bind specifically to a peptide. At least a portion of the peptide is encoded by a sequence selected from Tables 3 and 4. Optionally, the antibodies (or protein ligands) can each bind to a sequence encoded by one of Tables 3 and 4.

[0146] In some embodiments, the kit comprises at least two different nucleic acid probes that each hybridize to a portion of a different transcript comprising a sequence selected from SEQ ID NOs: 1-5103, Genes Number 1-9280, or a reverse complement thereof. By way of example, the nucleic acid probes can be parts of primer pairs. By way of example, each of the nucleic acid probes can comprise a different detectable moiety such as a barcode or fluorophore. Optionally, at least two different antibodies (or protein ligands) that each binds specifically to a peptide, on which at least a portion of the peptide is encoded by a sequence selected from Tables 3 and 4.

[0147] In the kit of some embodiments, (a) the nucleic acid probes comprise at least 6 but no more than 12 nucleic acid probes that each hybridize to a portion of a transcript comprising sequences selected from Table 3 or a reverse complement thereof, wherein each of the different nucleic acid probes comprises a different detectable moiety, and/or (b) at least 14 but no more than 40 nucleic acid probes that each hybridize to a portion of a transcript comprising sequences selected from Table 4 or a reverse complement thereof, wherein each of the different nucleic acid probes comprises a different detectable moiety. In the kit of some embodiments, (c) the at least two different antibodies (or protein ligands) comprise at least 6, but no more than 12 antibodies (or protein ligands) that each binds specifically to a peptide, and at least a portion of the peptide can be encoded by a sequence selected from Table 3, and each of the antibodies (or protein ligands) can comprises a different detectable moiety, and/or (d) the at least two different antibodies (or protein ligands) comprise at least 14, but no more than 20 antibodies (or protein ligands) that each binds specifically to a peptide, and at least a portion of the peptide is encoded by a sequence selected from Table 4, and each of the antibodies (or protein ligands) comprises a different detectable moiety.

[0148] In the kit of some embodiments, the at least two different nucleic acid probes comprise at least 6 but no more than 12 nucleic acid probes that each hybridize to a portion of a transcript comprising sequences selected from Table 3 or a reverse complement thereof. Each of the different nucleic acid probes can comprise a different detectable moiety.

[0149] In the kit of some embodiments, the at least two different nucleic acid probes comprise at least 14 but no more than 20 nucleic acid probes that each hybridize to a portion of a transcript comprising sequences selected from Table 4 or a reverse complement thereof. Each of the different nucleic acid probes can comprises a different detectable moiety.

[0150] In the kit of some embodiments, the at least two different antibodies (or protein ligands) comprise at least 6, but no more than 12 antibodies (or protein ligands) that each binds specifically to a peptide, in which at least a portion of the peptide is encoded by a sequence selected from Table 3. Each of the antibodies (or protein ligands) can comprises a different detectable moiety.

[0151] In the kit of some embodiments, the at least two different antibodies (or protein ligands) comprise at least 14, but no more than 20 antibodies (or protein ligands) that each binds specifically to a peptide, wherein at least a portion of the peptide is encoded by a sequence selected from Table 4. Each of the antibodies (or protein ligands) can comprises a different detectable moiety.

[0152] In some embodiments, the kit further comprises (i) a primer pair configured to amplify a transcript comprising a sequence from Table 3, in which at least one of the nucleic acid probes hybridizes to the transcript or portion thereof; or (ii) a primer pair configured to amplify a transcript comprising a sequence from Table 4, in which at least one of the nucleic acid probes hybridizes to the transcript or portion thereof. For example, the kit can comprise at least 2, 3, 4, 5, 6, 7, 8, 9, 10, 11, 12, 13, 14, 15, 16, 17, 18, or 19, but no more than 40 different primer pairs that each amplify a different transcript comprising a sequence from Table 3, such as 6-12 primer pairs, or at least 2, 3, 4, 5, 6, 7, 8, 9, 10, 11, 12, 13, 14, 15, 16, 17, 18, or 19, but no more than 40 different primer pairs that each amplify a different transcript comprising a sequence from Table 3, such as 14-20 primer pairs.

[0153] In some embodiments, the kit further comprises a primer pair configured to amplify a transcript comprising a sequence from Table 3. At least one of the nucleic acid probes as described herein can hybridize to the transcript or portion thereof. For example, the kit can comprise at least 2, 3, 4, 5, 6, 7, 8, 9, 10, 11, 12, 13, 14, 15, 16, 17, 18, or 19, but no more than 40 different primer pairs that each amplify a different transcript comprising a sequence from Table 3, such as 6-12 primer pairs.

[0154] In some embodiments, the kit further comprises a primer pair configured to amplify a transcript comprising a sequence from Table 4. At least one of the nucleic acid probes hybridizes to the transcript or portion thereof. For example, the kit can comprise at least 2, 3, 4, 5, 6, 7, 8, 9, 10, 11, 12, 13, 14, 15, 16, 17, 18, or 19, but no more than 40 different primer pairs that each amplify a different transcript comprising a sequence from Table 3, such as 14-20 primer pairs.

[0155] In the kit of some embodiments, the antibodies (or protein ligands) are each immobilized on a separate substrate, each substrate comprising a detectable moiety unique to the antibody immobilized thereon.

[0156] In the kit some embodiments, the kit further comprises an antibody that binds specifically to Flk1, Flt1, Flt4, or any other cell surface marker disclosed herein, or a combination of the listed items, optionally wherein the antibody is immobilized on a substrate. This antibody can be used to isolate Flk1+ cells or other hematopoietic EPCs with other cell surface marker(s) disclosed herein.

[0157] In the kit of some embodiments, the detectable moiety comprises (but is not limited to) a fluorophore, a radiolabel, a nanoparticle (such as a metal nanoparticle), magnetic bead, an enzyme, a quantum dot, or a nucleic acid barcode.

[0158] In the kit of some embodiments, the kit further comprises a reference composition comprising nucleic acids of cells. At least 50% of the nucleic acids can be from mononuclear endothelial stem cells from a peripheral blood sample of a control individual who does not have a perfusion shortage (e.g., ischemia and/or neoangiogenesis).

[0159] In some embodiments, a method of detecting a condition comprising perfusion shortage (such as neoangiogenesis and/or ischemia), or risk thereof in a subject is performed using the reagents of any of the kits or compositions described herein.

### Methods of Inhibiting, Ameliorating, Delaying the Onset of, Reducing the Likelihood of, Treating, or Preventing a Condition Comprising Neoangiogenesis or Ischemia

[0160] In some embodiments, a method of inhibiting, ameliorating, delaying the onset of, reducing the likelihood of, treating, or preventing a condition comprising neoangiogenesis or ischemia in a subject in need thereof is provided. The method can comprise administering to the subject a medical intervention comprising an effective amount of a modulator nucleic acid comprising at least one SEQ ID NOs: 1-5103 or Genes Number 1-9280. Optionally, the medical intervention further comprises an additional pharmacotherapy, or a surgical or percutaneous procedure, or a combination of two or more of the listed items. The modulator nucleic acid can be administered by any suitable means, for example, oral, intravenous, intramuscular, subcutaneous, intra-arterial or the like. The modulator nucleic acid can be administered in an amount effect to inhibit, reduce, or prevent or even increase expression, initiate expression or mimic the expression of genes listed in Tables 1-6. It will be appreciated that any method of inhibiting, ameliorating, delaying the onset of, reducing the likelihood of, treating, or preventing a condition comprising neoangiogenesis or ischemia described herein may be performed in conjunction with a method of detecting a condition comprising neoangiogenesis or ischemia as described herein. For example, the condition can be detected, and then the inhibiting, ameliorating, delaying the onset of, reducing the likelihood of, treating, or preventing a condition comprising neoangiogenesis or ischemia can be performed. Conceptually, in some embodiments, the method comprises any method of reducing, inhibiting, or preventing the increase of the expression levels of any of the gene products comprising or encoded at least in part by any of genes listed in Tables 1-6. Without being limited by theory, although the nucleic acids of Tables 1-6 are overexpressed in conditions comprising perfusion (such as ischemia and/or neoangiogenesis), it is contemplated that the overexpression can represent a component of disease or disease progression, or can represent a response to disease progression. Accordingly, it will be appreciated that a “modulator nucleic acid” can decrease the expression of a gene product, for example if the modulator nucleic acid comprises an antisense RNA, small interfering RNA (siRNA), microRNA (miRNA), short hairpin RNA (shRNA), or CRISPR gRNA. It will also be appreciated that a modulator nucleic acid can increase the expression of a gene product, for example by encoding the gene product. Accordingly, in some embodiments, a modulator nucleic is comprised by an expression vector, such as a lentiviral vector, adenoviral vector, or adeno-associated viral vector. It will be appreciated that a modulator nucleic acid comprises sufficient sequence identity to a target nucleic acid to either enhance activity of the encoded gene product (for example by encoding additional gene product) or to inhibit the encoded gene product (for example, by hybridizing to a target nucleic acid encoding the gene product. Accordingly, a modulator nucleic acid can comprise at least 1, 2, 3, 4, 5, 6, 7, 8, 9, 10, 11, 12, 13, 14, 15, 16, 17, 18, 19, 20, 21, 22, 23, 24, 25, 26, 27, 28, 29, 30, 35, 40, 45, or 50 consecutive nucleotides of a target nucleic acid. In some embodiments, a modulator nucleic acid hybridizes to a target nucleic acid under physiological conditions.

[0161] In the method of some embodiments, (a) if the subject is a female, the modulator nucleic acid comprises at least 1, 2, 3, 4, 5, 10, 15, 20, 25, 30, 35, 40, 45, or 50 consecutive nucleotides of one or more of any of Table 3 or an antisense strand thereof (for example, 2-14, 2-15, 2-16, 2-17, 2-18, 2-19, 2-20, 2-40, 4-14, 4-15, 4-20, 4-25, 4-30, 4-35, 4-40, 5-10, 5-14, 5-15, 5-16, 5-17, 5-18, 5-19, 5-40, 6-14, 6-15, 6-20, 6-25, 6-30, 6-35, 6-40, 8-14, 8-15, 8-20, 8-25, 8-30, 8-35, 8-40, 9-10, 9-14, 9-15, 9-16, 9-20, 9-40, 10-14, 10-15, 10-20, 10-25, 10-30, 10-35, or 10-40 of sequences listed in Table 3), or (b) if the subject is a male, the modulator nucleic acid comprises at least 5, 10, 15, 20, 25, 35, 40, 45, or 50 consecutive nucleotides of one or more of any at least one of Tables 2, 4, and 6 or an antisense strand thereof to the subject (for example, 2-14, 2-15, 2-16, 2-17, 2-18, 2-19, 2-20, 2-4-14, 4-15, 4-20, 4-25, 4-30, 4-35, 4-40, 5-10, 5-14, 5-15, 5-16, 5-17, 5-18, 5-19, 5-20, 5-40, 6-14, 6-15, 6-20, 6-25, 6-30, 6-35, 6-40, 8-14, 8-15, 8-20, 8-25, 8-30, 8-35, 8-40, 9-10, 9-14, 9-15, 9-16, 9-9-40, 10-14, 10-15, 10-20, 10-25, 10-30, 10-35, or 10-40 of the listed SEQ ID NO:s). In some embodiments, the same numerical range of gene products is detected for male and female subjects. In some embodiments, the modulator nucleic acid enhances activity of the gene product. In some embodiments, the modulator nucleic acid inhibits activity of the gene product, for example, comprising an antisense RNA, small interfering RNA (siRNA), microRNA (miRNA), short hairpin RNA (shRNA), or CRISPR gRNA.

[0162] In the method of some embodiments, if the subject is a female, the modulator nucleic acid comprises at least one of sequences listed in Table 3 or an antisense strand thereof.

[0163] In the method of some embodiments, if the subject is a male, the modulator nucleic acid comprises at least one of sequences listed in Table 4 or an antisense strand thereof.

[0164] In some embodiments, a method of inhibiting, ameliorating, delaying the onset of, reducing the likelihood of, treating, or preventing a condition comprising perfusion shortage in a subject in need thereof is provided. In some embodiments, the method comprises obtaining a sample of a subject, and obtaining expression levels from the sample of the subject. The expression levels can be of at least two specified different gene products from Tables 1-6. The expression levels of the specified different gene products can be outside of control ranges of expression levels of the specified different gene products. Accordingly, the method can comprise administering a medical intervention for the condition to the subject.

[0165] In the method of some embodiments, the cellular secretion is selected from the group consisting of: cell lysate, blood, plasma, serum, stool, lymph, cerebrospinal fluid, saliva, sputum, tears, sweat, semen, transudate, urine, exudate, tissue biopsy, and synovial fluid. In the method of some embodiments, the cellular secretion is selected from the group consisting of: blood, plasma, serum, stool, lymph, cerebrospinal fluid, saliva, sputum, tears, sweat, semen, transudate, urine, exudate, tissue biopsy, and synovial fluid

[0166] In some embodiments, the method further comprises correlating the detected levels of the specified different gene products to a severity of the condition or a likelihood of developing the condition, thereby ascertaining a severity or risk of the condition.

[0167] In the method of some embodiments, administering the medical intervention to the subject when the expression levels of at least 2, 3, 4, 5, 6, 7, 8, 9, 10, 11, 12, 13, 14, 15, 16, 17, 18, 19, 21, 22, 23, 24, 25, 26, 27, 28 29, 30, 31, 32, 33, 34, 35, 36, 37, 38, 39, 40, 50, or 60 specified different gene products are outside of the control ranges, including ranges between any two of the listed values, for example, 2-14, 2-15, 2-16, 2-17, 2-18, 2-19, 2-20, 2-40, 20-50, 20-60, 4-14, 4-15, 4-20, 4-4-30, 4-35, 4-40, 4-50, 4-60, 5-10, 5-14, 5-15, 5-16, 5-17, 5-18, 5-19, 5-20, 5-40, 5-50, 5-60, 6-14, 6-15, 6-20, 6-25, 6-30, 6-35, 6-40, 6-50, 6-60, 8-14, 8-15, 8-20, 8-25, 8-30, 8-35, 8-40, 8-50, 8-60, 9-9-14, 9-15, 9-16, 9-20, 9-40, 9-50, 9-60, 10-14, 10-15, 10-20, 10-25, 10-30, 10-35, 10-40, 10-50, or 10-60 specified different gene products.

[0168] In some embodiments, (a) if the subject is female, the method comprises determining the subject to have the condition or a risk thereof in the subject when the expression levels of at least two specified different gene products that each comprise a sequence selected from Table 3 (or peptide sequence encoded therefrom) are outside of the control ranges, and (b) if the subject is male, the method comprises determining the subject to have the condition or a risk thereof in the subject when the expression levels of at least two specified different gene products that each comprise a sequence selected from Table 4 (or peptide sequence encoded therefrom) are outside of the control ranges.

[0169] In some embodiments, if the subject is female, the method comprises determining the subject to have the condition or a risk thereof in the subject when the expression levels of at least two specified different gene products that each comprise a sequence selected from Table 3 (or peptide sequence encoded therefrom) are outside of the control ranges.

[0170] In some embodiments, if the subject is male, the method comprises determining the subject to have the condition or a risk thereof in the subject when the expression levels of at least two specified different gene products that each comprise a sequence selected from Table 4 (or peptide sequence encoded therefrom) are outside of the control ranges.

[0171] In some embodiments, (a) if the subject is female, the method comprises determining the subject to have the condition or risk thereof in the subject when the expression levels of 2-14, 2-15, 2-16, 2-17, 2-18, 2-19, 2-20, 2-40, 20-50, 20-60, 4-14, 4-15, 4-20, 4-25, 4-30, 4-35, 4-4-50, 4-60, 5-10, 5-14, 5-15, 5-16, 5-17, 5-18, 5-19, 5-20, 5-40, 5-50, 5-60, 6-14, 6-15, 6-20, 6-25, 6-30, 6-35, 6-40, 6-50, 6-60, 8-14, 8-15, 8-20, 8-25, 8-30, 8-35, 8-40, 8-50, 8-60, 9-10, 9-14, 9-15, 9-16, 9-20, 9-40, 9-50, 9-60, 10-14, 10-15, 10-20, 10-25, 10-30, 10-35, 10-40, 10-50, or 10-60 specified different gene products that each comprise a sequence selected from Table 3 (or peptide sequence encoded therefrom) are outside of the control ranges, and (b) if the subject is male, the method comprises determining the subject to have the condition or a risk thereof in the subject when the expression levels of 2-14, 2-15, 2-16, 2-17, 2-18, 2-19, 2-20, 2-40, 4-14, 4-15, 4-20, 4-25, 4-30, 4-35, 4-40, 5-10, 5-14, 5-15, 5-16, 5-17, 5-18, 5-19, 5-20, 5-40, 6-14, 6-15, 6-20, 6-25, 6-30, 6-35, 6-40, 8-14, 8-15, 8-20, 8-25, 8-30, 8-35, 8-40, 9-10, 9-14, 9-15, 9-16, 9-20, 9-40, 10-14, 10-15, 10-20, 10-25, 10-35, or 10-40 specified different gene products that each comprise a sequence selected from Table 4 (or peptide sequence encoded therefrom) are outside of the control ranges. In some embodiments, (a) if the subject is female, the method comprises determining the subject to have the condition or risk thereof in the subject when the expression levels of 2-14, 2-15, 2-16, 2-17, 2-18, 2-19, 2-20, 2-40, 4-14, 4-15, 4-20, 4-25, 4-30, 4-35, 4-40, 5-10, 5-14, 5-15, 5-16, 5-17, 5-18, 5-19, 5-20, 6-14, 6-15, 6-20, 6-25, 6-30, 6-35, 6-40, 8-14, 8-15, 8-20, 8-25, 8-30, 8-35, 8-40, 9-10, 9-14, 9-9-16, 9-20, 9-40, 10-14, 10-15, 10-20, 10-25, 10-30, 10-35, or 10-40 specified different gene products that each comprise a sequence selected from Table 3 (or peptide sequence encoded therefrom) are outside of the control ranges, and (b) if the subject is male, the method comprises determining the subject to have the condition or a risk thereof in the subject when the expression levels of 2-14, 2-15, 2-16, 2-17, 2-18, 2-19, 2-20, 2-40, 4-14, 4-15, 4-20, 4-25, 4-30, 4-35, 4-40, 5-10, 5-14, 5-15, 5-16, 5-17, 5-18, 5-19, 5-20, 5-40, 6-14, 6-15, 6-20, 6-25, 6-30, 6-35, 6-40, 8-14, 8-15, 8-20, 8-25, 8-30, 8-35, 8-40, 9-10, 9-14, 9-15, 9-16, 9-20, 9-40, 10-14, 10-15, 10-20, 10-25, 10-30, 10-35, or 10-40 specified different gene products that each comprise a sequence selected from Table 4 (or peptide sequence encoded therefrom) are outside of the control ranges. In some embodiments, the same numerical range of gene products is utilized for male and female subjects.

[0172] In some embodiments, if the subject is female, the method comprises determining the subject to have the condition or risk thereof in the subject when the expression levels of 2-14, 2-15, 2-16, 2-17, 2-18, 2-19, 2-20, 2-40, 20-50, 20-60, 4-14, 4-15, 4-20, 4-25, 4-30, 4-35, 4-40, 4-50, 4-60, 5-14, 5-15, 5-16, 5-17, 5-18, 5-19, 5-20, 5-40, 5-50, 5-60, 6-14, 6-15, 6-20, 6-25, 6-30, 6-35, 6-6-50, 6-60, 8-14, 8-15, 8-20, 8-25, 8-30, 8-35, 8-40, 8-50, 8-60, 9-10, 9-14, 9-15, 9-16, 9-20, 9-40, 9-50, 9-60, 10-14, 10-15, 10-20, 10-25, 10-30, 10-35, 10-40, 10-50, or 10-60 specified different gene products (or fewer than 60, 40, 30, or 20 specified different gene products) that each comprise a sequence selected from Table 3 (or peptide sequence encoded therefrom) are outside of the control ranges.

[0173] In some embodiments, if the subject is male, the method comprises determining the subject to have the condition or a risk thereof in the subject when the expression levels of only 2-14, 2-2-16, 2-17, 2-18, 2-19, 2-20, 2-40, 4-14, 4-15, 4-20, 4-25, 4-30, 4-35, 4-40, 5-10, 5-14, 5-15, 5-16, 5-18, 5-19, 5-20, 5-40, 6-14, 6-15, 6-20, 6-25, 6-30, 6-35, 6-40, 8-14, 8-15, 8-20, 8-25, 8-30, 8-8-40, 9-10, 9-14, 9-15, 9-16, 9-20, 9-40, 10-14, 10-15, 10-20, 10-25, 10-30, 10-35, or 10-40 specified different gene products (or fewer than 40, 30, or 20 specified different gene products) that each comprise a sequence selected from Table 4 (or peptide sequence encoded therefrom) are outside of the control ranges.

[0174] In some embodiments, (a) if the subject is female, the method comprises detecting, from the sample, expression levels of only 10-40 or 10-60 specified different gene products that each comprise a sequence selected from Table 3 (or peptide sequence encoded therefrom), and (b) if the subject is male, the method comprises detecting, from the sample, expression levels of only 10-40 specified different gene products that each comprise a sequence selected from Table 4 (or peptide sequence encoded therefrom).

[0175] In some embodiments, if the subject is female, the method comprises detecting, from the sample, expression levels of only 2-14, 2-15, 2-16, 2-17, 2-18, 2-19, 2-20, 2-40, 20-50, 20-60, 4-14, 4-15, 4-20, 4-25, 4-30, 4-35, 4-40, 4-50, 4-60, 5-10, 5-14, 5-15, 5-16, 5-17, 5-18, 5-19, 5-20, 5-5-50, 5-60, 6-14, 6-15, 6-20, 6-25, 6-30, 6-35, 6-40, 6-50, 6-60, 8-14, 8-15, 8-20, 8-25, 8-30, 8-35, 8-40, 8-50, 8-60, 9-10, 9-14, 9-15, 9-16, 9-20, 9-40, 9-50, 9-60, 10-14, 10-15, 10-20, 10-25, 10-30, 10-10-40, 10-50, or 10-60 specified different gene products (or fewer than 60, 40, 30, or 20 specified different gene products) that each comprise a sequence selected from Table 3 (or peptide sequence encoded therefrom).

[0176] In some embodiments, if the subject is male, the method comprises detecting, from the sample, expression levels of only 2-14, 2-15, 2-16, 2-17, 2-18, 2-19, 2-20, 2-40, 4-14, 4-15, 4-20, 4-25, 4-30, 4-35, 4-40, 5-10, 5-14, 5-15, 5-16, 5-17, 5-18, 5-19, 5-20, 5-40, 6-14, 6-15, 6-20, 6-25, 6-6-35, 6-40, 8-14, 8-15, 8-20, 8-25, 8-30, 8-35, 8-40, 9-10, 9-14, 9-15, 9-16, 9-20, 9-40, 10-14, 10-10-20, 10-25, 10-30, 10-35, or 10-40 specified different gene products (or fewer than 40, 30, or 20 specified different gene products) that each comprise a sequence selected from Table 4 (or peptide sequence encoded therefrom).

[0177] In the method of some embodiments, the medical intervention further comprises pharmacotherapy, or a surgical or percutaneous procedure, or a combination of two or more of the listed items.

[0178] In the method of some embodiments, the medical intervention comprises an anti-ischemic therapy selected from the group consisting of for example (but not limited to) beta-blockers, calcium antagonists, long- or short-acting nitrates, Ranolazine, artery bypass surgery (surgical revascularization), or a percutaneous coronary or arterial procedure, or any medical intervention (including suitable surgical and/or percutaneous procedure) to treat perfusion shortage (such as ischemia and/or neoangiogenesis) approved by, and/or meets guidelines set by a local health specialist organisation, or by a professional or government organization, for example the Food and Drug Administration, or the European Medicines Agency.

[0179] In the method of some embodiments, the medical intervention comprises a modulator nucleic acid or a modulator protein comprising or targeting at least one of genes listed in Tables 1-6 or gene products as described herein.

[0180] In the method of some embodiments, (a) if the subject is a female, the therapy comprises an modulator nucleic acid or a modulator protein comprising or targeting at least one of genes listed in Tables 1, 3, and 5 or gene products to the subject, or (b) if the subject is a male, the therapy comprises an modulator nucleic acid or a modulator protein comprising or targeting at least one of genes listed in Tables 2, 4, 6 or gene products to the subject.

[0181] In the method of some embodiments, the modulator nucleic acid comprises at least one of an antisense RNA, small interfering RNA, or CRISPR gRNA. In the method of some embodiments, the modulator nucleic acid is encoded by an expression vector, for example a lentiviral, adenoviral, or AAV vector for expressing the modulator nucleic acid in order to produce gene product encoded by the modulator nucleic acid (thus increasing activity of the gene product).

[0182] In the method of some embodiments, the subject may not present symptoms of any disease comprising perfusion shortage, such as neoangiogenesis and/or ischemia. For example, the subject may not present symptoms of any of ischemic cardiovascular disease, microangiopathy in cardiovascular disease (for example (but not limited to) diastolic heart failure), hypertrophic cardiomyopathy, cardiovascular pathology with relative ischemia (such as hypertrophic CMP, ischemic heart failure, and/or congenital cardiac disease), ischemic cerebrovascular disease (for example (but not limited to) CVA/TIA, and/or vascular dementia), ischemic peripheral artery disease, venous disease, orthopedic disease, sepsis, inflammation, lymphatic disease, ophthalmological disease associated with ischemia and/or neoangiogenesis (for example (but not limited to) neoangiogenesis in retinopathy), diabetic macro and microangiopathy, oncological pathology (for example (but not limited to) solid tumors, metastatic disease), endothelial dysfunction in cardiovascular and peripheral artery disease, ophthalmology (for example (but not limited to) neoangiogenesis in retinopathy), diabetic macro and microangiopathy, oncological pathology (for example (but not limited to) solid tumors and/or metastatic disease), endothelial dysfunction in cardiovascular and peripheral artery disease, nephrological disease associated with ischemia and/or neoangiogenesis, gynecological disease, orthopedic disease, lung disease (for example (but not limited to) COPD, emphysema, lung fibrosis, cystic fibrosis, lung cancer, pulmonary interstitial disease, and/or monitoring pre- and post-lung transplantation, pulmonary emboli), cerebrovascular disease (for example, stroke, TIA, microvascular dementia), and emboli (such as pulmonary emboli, deep venous thrombosis), inadequate ventilation/oxygenation of a mechanically ventilated subject, an inflammatory and auto-immune disease with an ischemic component, gastrointestinal disorders (for example (but not limited to) Crohn's disease, colitis ulcerosa), a neurodegenerative disease (for example (but not limited to) Parkinson's disease or multiple sclerosis), erectile dysfunction, sport injury, frailty, shock (such as post-resuscitation shock), arterial and venous diseases, disease related to lymphangiogenic disease, vascular remodeling including lymphangiogenic metastatic disease, arteriovenous malformation, arterial remodeling, or venous thrombosis, or a combination of two or more of the listed items. In the method of some embodiments, the subject may present symptoms of any disease comprising perfusion shortage as disclosed herein.

[0183] In the method of some embodiments, the condition comprising perfusion shortage is selected from the group consisting of: ischemic cardiovascular disease, microangiopathy in cardiovascular disease (such as diastolic heart failure), hypertrophic cardiomyopathy, cardiovascular pathology with relative ischemia (such as hypertrophic CMP, ischemic heart failure, and/or congenital cardiac disease), ischemic cerebrovascular disease (for example (but not limited to) CVA/TIA, and/or vascular dementia), ischemic peripheral artery disease, venous disease, orthopedic disease, sepsis, inflammation, lymphatic disease, ophthalmological disease associated with ischemia and/or neoangiogenesis (for example (but not limited to) neoangiogenesis in retinopathy), diabetic macro and microangiopathy, oncological pathology (for example (but not limited to) solid tumors, metastatic disease), endothelial dysfunction in cardiovascular and peripheral artery disease, ophthalmology (for example (but not limited to) as neoangiogenesis in retinopathy), diabetic macro and microangiopathy, oncological pathology (for example (but not limited to) as solid tumors and/or metastatic disease), endothelial dysfunction in cardiovascular and peripheral artery disease, nephrological disease associated with ischemia and/or neoangiogenesis, gynecological disease, orthopedic disease, lung disease (for example (but not limited to) COPD, emphysema, lung fibrosis, cystic fibrosis, lung cancer, pulmonary interstitial disease, and/or monitoring pre- and post-lung transplantation, pulmonary emboli), cerebrovascular disease (for example (but not limited to), stroke, TIA, microvascular dementia, and emboli (pulmonary emboli, deep venous thrombosis), inadequate ventilation/oxygenation of a mechanically ventilated subject, inflammatory disease and auto-immune disease with an ischemic component, gastrointestinal disorders (for example (but not limited to) Crohn's disease, colitis ulcerosa), a neurodegenerative disease (for example (but not limited to) Parkinson's disease or multiple sclerosis), erectile dysfunction, sport injury, frailty, shock (such as post-resuscitation shock), arterial and venous diseases, disease related to lymphangiogenic disease, vascular remodeling including lymphangiogenic metastatic disease, arteriovenous malformation, arterial remodeling, and venous thrombosis, or a combination of two or more of the listed items.

[0184] In the method of some embodiments, the condition comprising perfusion shortage comprises cardiovascular pathology with relative or absolute ischemia comprises congenital disease with significant or persistent shunting, such as open foramen ovale, ductus botalli, and/or ventricular shunt, or Eisenmenger syndrome/disease. Without being limited by theory, it is contemplated that the condition can comprise any congenital disease in which ischemia or neoangiogenesis plays an important role in the pathogenesis or determines prognostication or response to therapy.

[0185] In the method of some embodiments, the condition comprises relative or absolute ischemia. In some embodiments, ischemia due to increased demand for oxygen may occur due to, for instance, due to hypertrophy, inflammation or increased metabolism or sepsis.

[0186] In the method of some embodiments, the relative ischemia comprises cardiovascular disease with an increased demand for oxygen for instance but not limited to hypertrophic myocardium or and local and/or systemic increased oxygen demand (including but not limited to inflammation).

### Additional Embodiments

[0187] In some embodiments, a test to diagnose, measure, quantify and monitor disease comprising perfusion shortage (ischemic periods) in patients is provided. This test may also be used to measure therapy responsiveness in patients, for example anti-ischemic therapy, pro-ischemic therapy, measure neoangiogenesis, and increased tissue perfusion. Further, the test may be used to monitor disease progression or remission for better personalized and adjustable treatment in patients.

[0188] In some embodiments, disclosed herein is the identification of biomarkers that can identify and measure these episodes of oxygen deprivation with great certainty. Disclosed herein are unique diagnostic tests (method of blood processing), unique set of biomarkers, and a specific biostatistical algorithm and reference values to determine abnormal or pathological outcome/values in patients with disease comprising perfusion shortage such as neoangiogenesis (for example, tumor neoangiogenesis, and hematological metastatic disease, or ophthalmologic disease with retinal neoangiogenesis) or ischemia (for example cardiovascular or any other form of ischemic disease) from normal values in subjects without ischemic disease.

[0189] In some embodiments, molecular biomarkers have been identified that are up-regulated in patients having reperfusion shortage (such as ischemic patients) and may be used to diagnose (and quantify) ischemia including silent or transient ischemic episodes in CAD patients, and thus are likely to serve as sensitive biomarkers for the detection of mild ischemia in coronary, cerebrovascular and peripheral artery disease patients (and other ischemic patients). The gene expression patterns involved in the hypoxic response and/or the regulation of vasculogenesis likely represent a specific biomarker (RNA) profile that can be used for the diagnosis of coronary, cerebrovascular and peripheral artery disease.

[0190] The extent of reperfusion shortage (e.g., number and severity of ischemic episodes) may correlate with an incremental biological response and corresponding upregulation of the molecular biomarkers. Hence, the biomarkers may be used as to quantify ongoing ischemia in patients (using arbitrary units/scale), for example to quantify the extent of disease comprising perfusion shortage. Further, the biomarkers may also be used to monitor disease progression or remission over time.

[0191] The markers may be upregulated/responding rapidly to ischemic episodes, whereas other may be responding slowly to the hypoxic conditions. The former markers could be useful/appropriate in the dynamic setting of a hospital in which clinical decision making occurs from hour-to-hour (instantaneously), whereas the latter would be more useful in an outpatient setting (for a general practitioner or for population screening).

[0192] The methods (protocol, biomarkers, reference values and algorithm) of some embodiments disclosed herein may be used for the identification of current and past ischemic events (irrespective of its location (for instance (but not limited to) cerebral, myocardial, claudication) and can be used for the diagnosis of ischemic disease (including, but not limited to cardiovascular disease, cerebrovascular disease and peripheral artery disease).

[0193] The methods (protocol, biomarkers, reference values and algorithm) of some embodiments herein may be used for the identification of current and past ischemic events (irrespective of its location) and may be used for monitoring the progression of ischemic disease (including cardiovascular disease, cerebrovascular disease and peripheral artery disease), and to monitor the response (efficacy) to initiated therapy (pharmacotherapy or invasive therapy).

[0194] The methods (protocol, biomarkers, reference values and algorithm) of some embodiments herein may also be used to prognosticate/predict future outcome in patients with ischemic disease or disease with an important ischemic or neoangiogenesis component (mortality and adverse events) and to predict and measure/quantify the response of patients with ischemic disease (or disease with an important ischemic or neoangiogenesis component) to specific therapy (and therefore can be used to determine medical decision making (patient stratification and companion use of this assay for specific therapies or in depth diagnostic tracts (including more advanced imaging).

### EXAMPLES

[0195] The following examples are non-limiting and other variants within the scope of the art also contemplated.

### Example 1—Isolation of Flk1+(KDR1) Cells

[0196] KDR1 (also referred to as Flk1, VEGFR2, CD309 or Kdr) is a key marker defining hematopoietic stem cells. Human KDR1+ cells were isolated using immuno-selection by flow cytometry. After a venous blood draw, whole blood is processed by lysis of the erythrocytes, followed by a Ficoll gradient isolation of the mononucleated cells. The Flk1+(or Flt1+/Flt4+) cell preparation is isolated using an immunoseperation and a proprietary antibody directed against the CD cell surface markers Flk1+(CD309, KDR1, VEGFR2 or alternatively Flt1+/Flt4+). After cell isolation, the preparation is stored at −80° C. for further analysis, or processed for differential gene expression analysis or protein expression using DNAchip analysis, qPCR or any other method for differential expression analysis of nucleotide biomarkers.

### Example 2—Screen for Differentially Expressed Gene Products

[0197] A screen was performed for molecular biomarkers (here (RNA) oligonucleotides/candidate regulatory genes) using DNA chip analysis of 244 symptomatic patients with potential (cardiac/coronary) hypoxic episodes. Circulating KDR1-cells were isolated from blood samples, as these cells are involved in the physiological hypoxic response. Molecular expression patterns were cross-correlated with clinical diagnosis using current standard-of-care/best-of-care diagnostic tract. In order to increase the accuracy of the diagnoses in this clinical cohort (and reduce the number of false positive/false negative diagnoses), patients received a 6 month clinical telephone follow-up (and/or review of the clinical follow-up tract): in patients that were originally diagnosed as/allocated to the “angina pectoris excluded group” (no myocardial ischemia detectable), did hence not receive any (anti-ischemic) therapy as follow-up (and should not have shown any progression of ischemic heart disease (i.e. no persistent and/or progressive angina episodes and/or major cardiovascular events (including myocardial infarction). In the case a patient was inadvertently classified as “no myocardial ischemia detectable/diagnosed”, it should be possible to capture this misclassification (false negative) at 6-month clinical follow-up as the complaints would have deteriorated without appropriate pharmacotherapy or medical intervention. This is expected to reduce the number of false negative/inappropriately classified patients (patients with ischemia inadvertently diagnosed as “healthy”). Patients initially diagnosed as ischemic, with initiation of anti-ischemic pharmacotherapy or more invasive intervention should find confirmation of their diagnosis in their response to the specifically initiated pharmacotherapy, or upon invasive imaging and/or therapy (and their respective response to intervention). This should reduce the number of patients with false positive diagnosis. On average the number of initially falsely allocated patients using current standard-of-care diagnostics is estimated to be 16-26%.

[0198] Cross correlation of these clinical data with the molecular data set identified molecular markers (nucleotide probe or peptides) for female patients listed in Table 3 and molecular (nucleotide probe or peptides) markers for male patients that were statistically significantly differentially expressed in the classifier clinical data set. These markers and relative expression levels are shown in Tables 1-6. High throughput computing (i.e. machine learning) comparing different biostatistical analyses of the various combinations of biomarkers (out of the identified pool) showed that a minimal combination of 8 molecular biomarkers in female patients and a minimal combination of 12 biomarkers in male patients is sufficient to identify ischemic patients with the maximal/greatest accuracy in a separate independent patient cohort. This led to the misclassification error (alpha and beta error combined) in male patients of minimal 1.3% and in female patients of <0.05%. The misclassification rate of the current standard-of-care/best-of-care diagnostic tract involving multiple functional and imaging tests is 16-26%. The analysis of this assay comparing (individual) molecular biomarkers against reference values provided an objective (uniform) classification of the diagnosis of patient with a superior accuracy. The current standard-of-care/best-of-care diagnostic tract requires the (subjective) interpretation of exercise performances, ECG alterations and imaging phenomena by medical professionals (which is the basis of variability/inconsistency).

### Example 3—Analyses of Differential Expression of Gene Products in Female Patients

[0199] Analyses of differential expression of gene products in samples collected from ischemic female patients were performed using Affymetrix array and/or GeneChip Arrays. For female patients, the expression levels of genes listed in Tables 1, 3, 5 were up- or downregulated in ischemia (compared to non-ischemia controls). The current disclosure shows density plots of individual arrays and plots of individual arrays after frozen RNA normalization and showing re-analysis of 244 blood samples using Affymetrix Exon 2.0 microarrays. The differently expressed nucleic acids are shown in Tables 1, 3, 5. Accordingly, in accordance with some embodiments herein, it is shown that gene products corresponding to the genes listed in Tables 1, 3, 5 are expressed outside of control ranges in ischemic females.

### Example 4—Analyses of Differential Expression of Gene Products in Male Patients

[0200] Analyses of differential expression of gene products in samples collected from ischemic male patients were performed using Affymetrix Exon 2.0 array and/or GeneChip Arrays. For male patients, the genes listed in Tables 2, 4, 6 were up- or downregulated in ischemia (compared to non-ischemia controls). The current disclosure shows density plots of individual arrays and density plots of individual arrays after frozen RNA normalization and showing re-analysis of 244 blood samples using Affymetrix Exon 2.0 microarrays. The differently expressed nucleic acids are shown in Tables 2, 4, 6. Accordingly, in accordance with some embodiments herein, it is shown that gene products corresponding to the genes listed in Tables 2, 4, 6 are expressed outside of control ranges in ischemic males.

### Example 5—Validation Study for Female Patients

[0201] Validation of detection of conditions comprising ischemia and/or neoangiogenesis was performed for female patients using gene algorithms, exon algorithms and probe algorithms. Data in FIGS. 1-5 show that superior classification (as measured by classification scores) was observed for numbers of variables in Female biopanel ranging from 8-14 nucleotide biomarkers, resulting in an accuracy of >99.9% sensitivity using Fisher Discriminant analysis/Diagonal linear discriminant analysis. FIG. 1 shows a plot of classification scores with fitted curves for probes (gene products) for female patients using different statistical methods according to some embodiments. FIG. 2 shows a plot of classification scores with fitted curves for exons (gene products) for female patients using different statistical methods according to some embodiments. FIG. 3 shows LDA accuracy with fitted curve for exons versus the number of selected variables (gene products) for female patients according to some embodiments. FIGS. 4 and 5 show DLDA misclassification (FIG. 4) and LDA misclassification rate (FIG. 5) with fitted curves for probes versus the number of selected variables (gene products) for female patients according to some embodiments.

[0202] As shown by the data in FIGS. 1-5, superior classification (as indicated by high accuracy) was observed when the number of selected variables (number of gene products) for samples from female patients was around >8-10. The data were analyzed using several statistical methods. The data showed an accuracy of >99.9%. The data indicated that several statistical methods can be used for detection/diagnosis of conditions comprising ischemia in female patients with nearly 100% accuracy in accordance with some embodiments herein.

[0203] Table 8-Table 13 show data for accuracy of detection of ischemic heart disease in female patients. Variables indicated the number of gene products used in the method. The gene products were selected from Table 1, 3, 5.

TABLE 8

| | | | Accuracy |
|---|---|---|---|
| Probe Algorithm | No. of gene | type 1 + type 2 | (100% - type 1 and |
| Female subjects | products | error (%) | type 2 error (%)) |
| DLDA | 10 | 1.2 | 98.9 |
| FDA | 10 | 0.9 | 99.1 |
| LDA | 10 | 2.3 | 97.7 |
| PLSLDA | 10 | 1.9 | 98.1 |
| PLSRF | 10 | 1.0 | 99.0 |
| QDA | 10 | 0.8 | 99.2 |
| RF | 10 | 4.7 | 95.3 |

TABLE 9

| | | | Accuracy |
|---|---|---|---|
| Exon Algorithm | No. of gene | type 1 + type 2 | (100% - type 1 and |
| Female subjects | products | error (%) | type 2 error (%)) |
| DLDA | 10 | 4.2 | 95.8 |
| FDA | 10 | 2.4 | 97.6 |
| LDA | 10 | 6.6 | 93.4 |
| PLSLDA | 10 | 3.2 | 96.8 |
| PLSRF | 10 | 6.1 | 93.9 |
| QDA | 10 | 8.7 | 91.3 |
| RF | 10 | 8.9 | 91.1 |

TABLE 10

| | | | Accuracy |
|---|---|---|---|
| Gene Algorithm | No. of gene | type 1 + type 2 | (100% - type 1 and |
| Female subjects | products | error (%) | type 2 error (%)) |
| DLDA | 10 | 1.6 | 98.5 |
| FDA | 10 | 1.4 | 98.6 |
| LDA | 10 | 2.3 | 97.7 |
| PLSLDA | 10 | 2.3 | 97.8 |
| PLSRF | 10 | 3.9 | 96.1 |
| QDA | 10 | 4.6 | 95.4 |
| RF | 10 | 5.6 | 94.4 |

TABLE 11

| | | | Accuracy |
|---|---|---|---|
| Probe Algorithm | No. of gene | type 1 + type 2 | (100% - type 1 and |
| Female subjects | products | error (%) | type 2 error (%)) |
| DLDA | 14 | 1.1 | 98.9 |
| FDA | 14 | <0.05 | ^{~}100.0 |
| LDA | 14 | <0.05 | ^{~}100.0 |
| PLSLDA | 14 | 1.1 | 98.9 |
| PLSRF | 14 | <0.05 | ^{~}100.0 |
| QDA | 14 | <0.05 | ^{~}100.0 |
| RF | 14 | 4.3 | 95.7 |

TABLE 12

| | | | Accuracy |
|---|---|---|---|
| Exon Algorithm | No. of gene | type 1 + type 2 | (100% - type 1 and |
| Female subjects | products | error (%) | type 2 error (%)) |
| DLDA | 14 | <0.05 | ^{~}100.0 |
| FDA | 14 | 1.1 | 99.0 |
| LDA | 14 | 1.2 | 98.9 |
| PLSLDA | 14 | <0.05 | ^{~}100.0 |
| PLSRF | 14 | 1.1 | 98.9 |
| QDA | 14 | 4.1 | 95.9 |
| RF | 14 | 6.4 | 93.6 |

TABLE 13

| | | | Accuracy |
|---|---|---|---|
| Gene Algorithm | No. of gene | type 1 + type 2 | (100% - type 1 and |
| Female subjects | products | error (%) | type 2 error (%)) |
| DLDA | 14 | 1.1 | ^{~}98.9 |
| FDA | 14 | 3.3 | 96.7 |
| LDA | 14 | 1.2 | 98.9 |
| PLSLDA | 14 | 2.3 | 97.8 |
| PLSRF | 14 | <0.05 | ^{~}100 |
| QDA | 14 | 10.5 | 89.5 |
| RF | 14 | 5.4 | 94.6 |

### Example 6—Validation Study for Male Patients

[0204] Validation of detection of conditions comprising (cardiac) ischemia was performed for male patients using exon, probe, and gene algorithms.

[0205] Data in FIGS. 6 and 7 show that superior classification (as measured by classification scores) was observed for numbers of variables in male biopanel >15, resulting in a misclassification of 1.7% (or >98.3% sensitivity) using Fisher Discriminant analysis/Diagonal linear discriminant analysis. FIG. 6 shows a plot of classification scores with fitted curves for probes for male patients according to some embodiments. FIG. 7 shows plots of classification scores with fitted curves for genes for male patients according to some embodiments. Accuracy as a measure of how well this binary classification test correctly identifies or excludes a condition, here ischemic heart disease, is defined as the proportion of correct predictions (both true positives and true negatives) among the total number of cases examined or 100%−alpha and beta error. As shown by the data in FIGS. 6 and 7, the optimal number of selected variables (number of gene products) for samples from male patients was >14. The data were analyzed using several statistical methods. The data showed an accuracy of 98.3%. The data indicated that several statistical methods can be used for detection/diagnosis of conditions comprising ischemia in male patients with nearly 100% accuracy in accordance with some embodiments herein.

[0206] Tables 14-16 show data for accuracy of detection of ischemic heart disease in male patients. Variables indicated the number of gene products used in the method. The gene products were selected from Tables 2, 4, 6.

TABLE 14

| | | | Accuracy |
|---|---|---|---|
| Probe Algorithm | No. of gene | type 1 + type 2 | (100% - type 1 and |
| Male subjects | products | error (%) | type 2 error (%)) |
| DLDA | 14 | 2.9 | 97.1 |
| FDA | 14 | 1.7 | 98.3 |
| LDA | 14 | 2.4 | 97.6 |
| PLSLDA | 14 | 11.3 | 88.7 |
| PLSRF | 14 | 7.2 | 92.8 |
| QDA | 14 | 2.4 | 97.6 |
| RF | 14 | <0.05 | ^{~}100 |

TABLE 15

| | | | Accuracy |
|---|---|---|---|
| Exon Algorithm | No. of gene | type 1 + type 2 | (100% - type 1 and |
| Male subjects | products | error (%) | type 2 error (%)) |
| DLDA | 14 | 6.5 | 93.5 |
| FDA | 14 | 3.5 | 96.5 |
| LDA | 14 | 7.8 | 92.2 |
| PLSLDA | 14 | 2.9 | 97.1 |
| PLSRF | 14 | 8.3 | 91.7 |
| QDA | 14 | 7.2 | 92.8 |
| RF | 14 | 6.4 | 93.6 |

TABLE 16

| | | | Accuracy |
|---|---|---|---|
| Genes Algorithm | No. of gene | type 1 + type 2 | (100% - type 1 and |
| Male subjects | products | error (%) | type 2 error (%)) |
| DLDA | 14 | 5.6 | 94.4 |
| FDA | 14 | 10.9 | 89.1 |
| LDA | 14 | 8.3 | 91.7 |
| PLSLDA | 14 | 8.6 | 91.4 |
| PLSRF | 14 | 9.2 | 90.8 |
| QDA | 14 | 7.4 | 92.6 |
| RF | 14 | 9.0 | 91.0 |

### Example 7—Validation Study for Male and Female Patients

[0207] Validation of detection of conditions comprising ischemia/neoangiogenesis was performed for male and female patients using gene algorithms, exon algorithms, and probe algorithms.

[0208] Tables 17 and Table 18 show data for accuracy of detection of ischemic heart disease in male and female patients combined. Variables indicated the number of gene products used in the method. The gene products were selected from Tables 1-6. Depending on the statistical method used, there was an accuracy of 67-75%. These data show that ischemic heart disease in both male and female patients can be accurately detected by methods in accordance with some embodiments herein, with an accuracy of 67% of higher.

TABLE 17

| | | | Accuracy |
|---|---|---|---|
| | No. of gene | type 1 + type 2 | (100% - type 1 and |
| Exon Algorithm | products | error (%) | type 2 error (%)) |
| DLDA | 24 | 33.0 | 67.0 |
| FDA | 24 | 33.5 | 66.5 |
| LDA | 24 | 30.5 | 69.5 |
| PLSLDA | 24 | 27.0 | 73.0 |
| PLSRF | 24 | 31.1 | 68.9 |
| QDA | 24 | 33.5 | 66.5 |
| RF | 24 | 26.7 | 73.3 |

TABLE 18

| | | | Accuracy |
|---|---|---|---|
| | No. of gene | type 1 + type 2 | (100% - type 1 and |
| Probe Algorithm | products | error (%) | type 2 error (%)) |
| DLDA | 20 | 27.2 | 72.8 |
| FDA | 20 | 24.8 | 75.2 |
| LDA | 20 | 24.7 | 75.3 |
| PLSLDA | 20 | 26.7 | 73.3 |
| PLSRF | 20 | 29.3 | 70.7 |
| QDA | 20 | 25.4 | 74.4 |
| RF | 20 | 26.2 | 73.8 |

### Example 8—Comparison to MIBI-SPECT Tracking

[0209] Blood samples of patients with anginal complaints and scheduled for elective nuclear and CMR (cardiac magnetic resonance imaging) perfusion imaging (MIBI SPECT) are collected. MIBI-SPECT is tracking of radionuclide-labelled molecules to the well-perfused myocardial tissue target tissues and is generally considered to be the gold standard for determination of imaging in the clinic. Initial diagnosis and long-term clinical outcome of these patients are prospectively cross-correlated with expression patterns of molecular biomarkers comprising or encoded by SEQ ID NOs: 1-5103 (or a peptide sequence encoded therefrom), Genes Number 1-9280 (or a peptide sequence encoded therefrom). Cross correlations are made with diagnosis, progression (and prognosis (MACCE events)) and therapy responsiveness.

### Example 9—Accuracy of Diagnosis by Proposed MyCor Classifier Methods

[0210] In the first analysis of 244 patients, the proof of concept was verified. Data indicated very high rate of correct diagnosis, i.e., in 98.3-99.9% of the patients (without the need for patient selection). The number of false negative and false positives was extremely low, i.e., <0.05-1.7%.

[0211] The current standard-of-care diagnostic tract of ischemic heart disease requires ECG, blood work, exercise test, and nuclear and/or CT(A) scan in a specialised cardiology outpatient clinic. The observed sensitivity of current best-in-class diagnostic is 74-84%.

[0212] Diagnosis based on the proposed MyCor Classifier methods disclosed herein was superior to the current best-in-class diagnostic.

[0213] The methods, compositions, uses, and kit described herein permitted detection with a (simple) blood test. The methods provided a diagnosis (and severity) of ischemic heart disease (angina) with an accuracy >98-99.9% in an all-comers population (non-selected ‘real world’ population). No sub-stratification is needed for cardiovascular risk factors. Blood test according to the methods herein outperformed sophisticated imaging techniques like nuclear imaging and CT (angio) scans. Thus, a first-in-class diagnostic blood test for conditions comprising ischemia and/or neoangiogenesis (such as heart disease) is described in some embodiments herein.

### Example 10—BioBank Clinical Validation

[0214] This Example provides further analysis of the first 244 patients. A retrospective analysis of the first ‘real world’ patients with chest pain showed that the procedural failure of the diagnostic test was 1.3% in the last 200 patients. This study provided a proof-of-principle. Based on the analysis of the data, a classifier of 14 biomarkers had an accuracy of 98-99.9%, and a classifier of 2 biomarkers has an accuracy of 82%. Thus, without being limited by theory, a combination of platforms may be indicated. It is further contemplated that validation of quantification of ischemia (based on the methods, kits, compositions, and uses disclosed herein) would allow one to compare treatments and to continue to monitor patients.

### Example 11—Confirmatory Analysis in Ischemic Disease

[0215] In the first (“Proposed MyCor Classifier”) analysis of 244 patients (described, for example, in Examples 9 and 10), a proof-of-concept was established (alpha+beta error 0.05-1.7% in non-optimized conditions). No sub-stratification was needed for cardiovascular risk factors.

[0216] In a second analysis/study, a refined definition of an ischemic patient population is utilized for the assessed population (n=1000). In the second analysis, adjudication is further optimized, biostatistical analysis is further optimized, sub-stratification explored, optimized and standardized (FDA approved) micro array platform are used, cross-correlation with the extend of ischemia on advanced imaging (including MIBI SPECT and coronary angiography) is analysed, and retrospective and prospective analyses are performed. Based on a consideration of the above factors, a sensitivity of >99% is expected to be obtained in all patients.

[0217] Without being limited by theory, preliminary bioinformatics analysis suggest that a classifier can be generated using the blood samples of CAD patients based on in depth bioinformatics (retrospective) analysis of patient cohort by a biostatistician to optimise algorithms, including (but not limited to) Random Forrest plot analysis, (un)-scaled SVM analysis, and Bootstrapping.

[0218] Data annotation is useful for diagnosis based on the current practise in cardiology outpatient clinic involving patient interview, ECG, blood work, bicycle test, MSCT, etc., in clinical follow up at 6 months. It is contemplated that clinical follow up can reduce the false negative and false positive allocated patients in the SOC diagnostic group.

[0219] In contrast, to diagnosis based on the current practice in cardiology outpatient clinic, advanced imaging (including for example myocardial perfusion imaging with MIBI SPECT) has improved sensitivity and specificity as an advanced myocardial perfusion imaging test. Analysis was performed using Affymetrix Exon 2.0 microarray platform and samples of 244 patients re-analysed using expression profiling.

### Example 12—Product Development Status 3

[0220] In an analysis, ischemic RNA and protein signatures are further validated and expanded in a prospective study/registry in a better-defined ischemic patient population (n=5000). Adjudication is further optimized, biostatistical analysis is further optimized, sub-stratification explored, optimized and standardized (FDA approved) micro array platform are used, cross-correlation with the extend of ischemia on advanced imaging (such as MIBI SPECT, and other myocardial perfusion imaging) is analysed, and retrospective and prospective analyses are performed. Diagnostic platform(s) are identified and optimized, for example, microarray (for validation and reference), Luminex assays, Multiplex assay, qPCR, protein assay (ELISA), Nanostring, or direct sequencing.

### Example 13—Isolation of Nucleic Acids

[0221] Methods of isolating nucleic acids from cells are well known in the art. For example, methods of isolating nucleic acids from cells using solid phase binding materials without the use of a lysis solution is described in US 2005/0106602 A1, which is hereby incorporated by reference in its entirety. Methods for isolating total RNA from cells are also well known in the art. For example, methods for isolating RNA from cells using an extraction solution comprising formamide is described in U.S. Pat. No. 9,416,357 B2, which is hereby incorporated by reference in its entirety. Several commercially available kits allow for high-throughput analysis-grade nucleic acids to be isolated from cells.

[0222] In some embodiments, the method, use, or composition comprises various steps or features that are present as single steps or features (as opposed to multiple steps or features). For example, in one embodiment, the method comprises detecting the condition or a risk thereof in the subject when the expression levels of the specified different gene products are outside of the control ranges, and further includes inhibiting, ameliorating, delaying the onset of, reducing the likelihood of, treating, or preventing a condition comprising perfusion shortage by administering a medical intervention as described herein. The medical intervention may be provided in a single step or administration, or over a period of time, as is suitable in the art. Multiple features or components may be provided in alternate embodiments. In some embodiments, the method, composition, or use comprises one or more medical interventions. In some embodiments, the medical intervention comprises a modulator (such as an inhibitor or enhancer) of a nucleic acid comprising any of nucleotide sequences selected from Tables 1-6, or a peptide encoded by a nucleic acid comprising any of sequences of Tables 1-6.

### Example 14—Clinical Study of Ischemic Biomarker Analysis in Heart Disease Patients

[0223] This example covers a clinical study for detecting ischemia in patients without myonecrosis. Currently, patients analyzed for chest pain reminiscent of angina pectoris are analyzed using a combination of including ECG, standard blood works, exercise testing, and CT analysis (including calcium imaging and CT angiography) only to result in an adequate diagnosis in 74% of the cases. Even with advanced perfusion imaging, the adequate/accurate diagnosis of ischemic heart disease does not exceed 84%. In addition, setting up a multi-disciplinary analysis of these complex patients remains a logistical challenge (involving functional testing and imaging, involvement of the dept of cardiology, nuclear medicine, and radiology) and represents a laborious and costly diagnostic track (with disappointing accuracy). In addition, the (extend of) ischemia (or the biological response to ischemia) cannot be readily quantified (or expressed in AU) for use in monitoring of these patients for disease progression or therapy responsiveness.

[0224] Subjects selected for the study will be selected from among adults of at least 18 years of age presenting chest pain or other cardiac related symptoms. Excluded subjects will include those who: (1) received percutaneous coronary intervention (PCI) within the last 6 months, (2) coronary artery bypass graft surgery within the past 6 months, (3) are suspected of acute coronary syndrome (acute myocardial infarction and unstable angina) or are Troponin positive, (4) have prior documented myocardial infarction within 30 days prior to cCTA or between cCTA and ICA, (5) have tachycardia or significant arrhythmia, (6) have a known anaphylactic allergy to iodinated contrast, (7) are pregnant or have unknown pregnancy status as well as childbearing potential, (8) have a body mass index compatible with imaging, (9) requires an emergent procedure, (10) displays evidence of ongoing or active clinical instability, including acute chest pain (sudden onset), cardiogenic shock, unstable blood pressure with systolic blood pressure <90 mmHg, and severe congestive heart failure (NYHA III or IV) or acute pulmonary edema, (11) has any active, serious, life-threatening disease with a life expectancy of less than 2 months, (12) is unable to comply with study procedures.

[0225] The study will enroll patients with angina suspect complaints and will enroll two cohorts of patients. Cohort 1 (evaluate for sensitivity) will include subjects with angina disease and Cohort 2 of controls (evaluate for specificity) will include subjects without angina disease. The sample size of approximate 180 will provide 90% power to establish that the studied ischemic biomarker profile method is superior over the standard method (Standard Method) at two-sided significance level of 0.05. In the sample size calculation, it is assumed that the sensitivity and specificity are at least 92% for Test Method and no more than 80% for the Control Method.

[0226] The study will enroll at least 75 health subjects without angina disease into Cohort 2. In addition, the study will enroll clinical evaluation subjects who present themselves to the participating sites for clinical evaluation for potential angina disease. It is expected that 30% of them will have angina disease (to be included in Cohort 1 analysis) and 70% of them will not have angina disease (to be included in Cohort 2 analysis). The study will enroll at least 600 clinical evaluation subjects to reach at least 180 Cohort 1 subjects.

[0227] Subjects who are determined to have the disease by the methods of the present study and Standard Methods may be treated (the investigator can decide to follow them without immediate treatment). All other subjects (subjects who are determined to have angina by only one method and subjects who are determined to no having angina by both methods) will be followed without treatment unless the investigator has determined that it is unethical not to treat the subjects based on well documented clinical observations. If the following treatment occurs within 6 months of chest pain, the subject will be stratified to the treatment group.

[0228] A thorough clinical work up which consists of multiple exams and visits to the clinic would be required of the patient, as the next step. An analytical framework presented in FIG. 11, demonstrates the complex decision making involved. For patients, who are suspected of CAD, will undergo invasive coronary angiography furthering their risk of radiation exposure. A test often ordered and completed weeks after initial complaint of chest pain. FIG. 12 provides a thorough summary of sensitivity and specificity results of invasive tests currently used to diagnosis CAD. Study assessments will be performed at the visits and time points outlined in the Time and Events Schedule FIG. 13.

[0229] A total of 1000 subjects will be enrolled. Subjects who provide informed consent will provide blood samples at Baseline (10 ml) and prior to imaging (15 ml). The study site will reach out to the subject at month 6 and 12 and capture prognosis, treatment related and if any, hospitalization details.

[0230] Any subject who voluntarily withdraws consent or is discontinued from the study prior to completion will be considered as withdrawn from the study. Subjects may be discontinued from the study under any of the following circumstances: (1) occurrence of intolerable AE, as assessed by the investigator or designee; (2) withdrawal of consent; (3) lost to follow-up; (4) Administrative reasons (e.g., sponsor decision); (5) major violation of the protocol; (6) if, in the opinion of the qualified investigator, it is in the best interest of the subject; (7) non-compliance with study requirements and restrictions. Replacement subjects are to be added at the sponsor's discretion, in agreement with the principal investigator.

[0231] Subjects will undergo phlebotomy and provide a total of 10 ml blood in an sterile RNA stabilizer tube and 5 ml whole blood at Baseline and prior to cardiac imaging. The investigational site will prepare the samples, as instructed, by the sponsor. The investigational site will be store the RNA collected samples in a secured research area at room temperature prior to shipment to the sponsor. The sponsor will work with each clinical site to determine the appropriate shipment schedule.

[0232] Medical histories will be obtained according to the site's SOPs. Medical histories will include demographic data (date of birth, sex, race, and ethnicity); histories of acute, chronic, and infectious disease; surgical and oncologic histories; and any reported conditions affecting major body systems. All findings on medical history will be evaluated by the investigator for clinical significance. All medications (prescription and non-prescription, herbal medications/natural health products, and investigational drugs) taken by the subjects during the 30 days prior to consent will be recorded in the source documentation as medication history. The physical examination, assessing the subject's overall health and physical condition, will be performed according to the site's SOPs. Height, weight, and BMI will be recorded. Vital signs will be measured and managed according to the site's SOPs. Vital signs will consist of systolic and diastolic blood pressure (mmHg), heart rate (bpm), respiratory rate (breaths/min), and oral temperature (° C.). Safety 12-lead ECGs will be performed and interpreted according to the site's SOPs or if complete Telemetry is available, data is acceptable. If the following treatment occurs within 6 months of chest pain, the subject will be stratified to treatment group: (1) treatment with beta blockers, antiangina Medications, antihypertensive drug, calcium channel blocker and anticoagulant; (2) angioplasty, coronary stent, cardiac catherization, revascularization, coronary angioplasty; (3) coronary artery bypass surgery and hybrid coronary revascularization.

[0233] All analyses will be performed using SAS version 9.3 or higher, run on the Microsoft Windows Server 2003 R2 operating system.

[0234] While various aspects and embodiments have been disclosed herein, other aspects and embodiments will be apparent to those skilled in the art. The various aspects and embodiments disclosed herein are for purposes of illustration and are not intended to be limiting, with the true scope and spirit being indicated by the following claims.

[0235] For each method of described herein, relevant compositions for use in the method are expressly contemplated, uses of compositions in the method, and, as applicable, methods of making a medicament for use in the method are also expressly contemplated. For example, for methods of inhibiting, ameliorating, delaying the onset of, reducing the likelihood of, treating, or preventing a condition comprising perfusion shortage (or neoangiogenesis), corresponding compositions for use in the corresponding method are also contemplated, as are uses of the corresponding composition to inhibit, ameliorate, delaying the onset of, reduce the likelihood of, treat, or prevent a condition comprising perfusion shortage. In some cases, disclosed nucleotide sequences as medical compounds or targets may be used to promote ischemic conditions, such as in tumor angiogenesis.

[0236] One skilled in the art will appreciate that, for this and other processes and methods disclosed herein, the functions performed in the processes and methods can be implemented in differing order. Furthermore, the outlined steps and operations are only provided as examples, and some of the steps and operations can be optional, combined into fewer steps and operations, or expanded into additional steps and operations without detracting from the essence of the disclosed embodiments.

[0237] With respect to the use of substantially any plural and/or singular terms herein, those having skill in the art can translate from the plural to the singular and/or from the singular to the plural as is appropriate to the context and/or application. The various singular/plural permutations may be expressly set forth herein for sake of clarity.

[0238] It will be understood by those within the art that, in general, terms used herein, and especially in the appended claims (e.g., bodies of the appended claims) are generally intended as “open” terms (e.g., the term “including” should be interpreted as “including but not limited to,” the term “having” should be interpreted as “having at least,” the term “includes” should be interpreted as “includes but is not limited to,” etc.). It will be further understood by those within the art that if a specific number of an introduced claim recitation is intended, such an intent will be explicitly recited in the claim, and in the absence of such recitation no such intent is present. For example, as an aid to understanding, the following appended claims may contain usage of the introductory phrases “at least one” and “one or more” to introduce claim recitations. However, the use of such phrases should not be construed to imply that the introduction of a claim recitation by the indefinite articles “a” or “an” limits any particular claim containing such introduced claim recitation to embodiments containing only one such recitation, even when the same claim includes the introductory phrases “one or more” or “at least one” and indefinite articles such as “a” or “an” (e.g., “a” and/or “an” should be interpreted to mean “at least one” or “one or more”); the same holds true for the use of definite articles used to introduce claim recitations. In addition, even if a specific number of an introduced claim recitation is explicitly recited, those skilled in the art will recognize that such recitation should be interpreted to mean at least the recited number (e.g., the bare recitation of “two recitations,” without other modifiers, means at least two recitations, or two or more recitations). Furthermore, in those instances where a convention analogous to “at least one of A, B, and C, etc.” is used, in general such a construction is intended in the sense one having skill in the art would understand the convention (e.g., “a system having at least one of A, B, and C” would include but not be limited to systems that have A alone, B alone, C alone, A and B together, A and C together, B and C together, and/or A, B, and C together, etc.). In those instances where a convention analogous to “at least one of A, B, or C, etc.” is used, in general such a construction is intended in the sense one having skill in the art would understand the convention (e.g., “a system having at least one of A, B, or C” would include but not be limited to systems that have A alone, B alone, C alone, A and B together, A and C together, B and C together, and/or A, B, and C together, etc.). It will be further understood by those within the art that virtually any disjunctive word and/or phrase presenting two or more alternative terms, whether in the description, claims, or drawings, should be understood to contemplate the possibilities of including one of the terms, either of the terms, or both terms. For example, the phrase “A or B” will be understood to include the possibilities of “A” or “B” or “A and B.”

[0239] In addition, where features or aspects of the disclosure are described in terms of Markush groups, those skilled in the art will recognize that the disclosure is also thereby described in terms of any individual member or subgroup of members of the Markush group.

[0240] As will be understood by one skilled in the art, for any and all purposes, such as in terms of providing a written description, all ranges disclosed herein also encompass any and all possible subranges and combinations of subranges thereof. Any listed range can be easily recognized as sufficiently describing and enabling the same range being broken down into at least equal halves, thirds, quarters, fifths, tenths, etc. As a non-limiting example, each range discussed herein can be readily broken down into a lower third, middle third and upper third, etc. As will also be understood by one skilled in the art all language such as “up to,” “at least,” and the like include the number recited and refer to ranges which can be subsequently broken down into subranges as discussed above. For example, “about 5”, shall include the number 5. Finally, as will be understood by one skilled in the art, a range includes each individual member. Thus, for example, a group having 1-3 cells refers to groups having 1, 2, or 3 cells. Similarly, a group having 1-5 cells refers to groups having 1, 2, 3, 4, or 5 cells, and so forth.

[0241] From the foregoing, it will be appreciated that various embodiments of the present disclosure have been described herein for purposes of illustration, and that various modifications may be made without departing from the scope and spirit of the present disclosure. Accordingly, the various embodiments disclosed herein are not intended to be limiting, with the true scope and spirit being indicated by the following claims.

Lengthy table referenced here
US20230416822A1-20231228-T00001
Please refer to the end of the specification for access instructions.

Lengthy table referenced here
US20230416822A1-20231228-T00002
Please refer to the end of the specification for access instructions.

Lengthy table referenced here
US20230416822A1-20231228-T00003
Please refer to the end of the specification for access instructions.

Lengthy table referenced here
US20230416822A1-20231228-T00004
Please refer to the end of the specification for access instructions.

Lengthy table referenced here
US20230416822A1-20231228-T00005
Please refer to the end of the specification for access instructions.

Lengthy table referenced here
US20230416822A1-20231228-T00006
Please refer to the end of the specification for access instructions.

LENGTHY TABLES
The patent application contains a lengthy table section. A copy of the table is available in electronic form from the USPTO web site (https://seqdata.uspto.gov/?pageRequest=docDetail&DocID=US20230416822A1). An electronic copy of the table will also be available from the USPTO upon request and payment of the fee set forth in 37 CFR 1.19(b)(3).

The application's sequence listing, which the Patent Office published only in electronic form, follows.

SEQUENCE LISTING (10001 sequences)

SEQ ID NO: 1 - DNA, 25 bp, Artificial Sequence
  Description of Artificial Sequence: Synthetic probe
atcagaggcagttaagatccaatgt

SEQ ID NO: 2 - DNA, 25 bp, Artificial Sequence
  Description of Artificial Sequence: Synthetic probe
aagtatagacgccccgtctctgcct

SEQ ID NO: 3 - DNA, 25 bp, Artificial Sequence
  Description of Artificial Sequence: Synthetic probe
ctttatcccattttcgacgtgcccg

SEQ ID NO: 4 - DNA, 25 bp, Artificial Sequence
  Description of Artificial Sequence: Synthetic probe
ctgagactcccagtacgcggatcgt

SEQ ID NO: 5 - DNA, 25 bp, Artificial Sequence
  Description of Artificial Sequence: Synthetic probe
actctcttgccagtcgaacctcgtg

SEQ ID NO: 6 - skipped

SEQ ID NO: 7 - DNA, 25 bp, Artificial Sequence
  Description of Artificial Sequence: Synthetic probe
cgtgtaaatcccaccgtaccggaga

SEQ ID NO: 8 - DNA, 25 bp, Artificial Sequence
  Description of Artificial Sequence: Synthetic probe
aggcacactcccaagttccggttcg

SEQ ID NO: 9 - DNA, 25 bp, Artificial Sequence
  Description of Artificial Sequence: Synthetic probe
aggcctgtcccaactccatcgagag

SEQ ID NO: 10 - DNA, 25 bp, Artificial Sequence
  Description of Artificial Sequence: Synthetic probe
agtgcctgtccctatctccaaacgg

SEQ ID NO: 11 - DNA, 25 bp, Artificial Sequence
  Description of Artificial Sequence: Synthetic probe
ctgttctcgtccctcggtgtaggac

SEQ ID NO: 12 - DNA, 25 bp, Artificial Sequence
  Description of Artificial Sequence: Synthetic probe
tccggaatccagaagataacagtct

SEQ ID NO: 13 - DNA, 25 bp, Artificial Sequence
  Description of Artificial Sequence: Synthetic probe
gttacggtttccagtcagatccagg

SEQ ID NO: 14 - DNA, 25 bp, Artificial Sequence
  Description of Artificial Sequence: Synthetic probe
accatacttccacgaccggtgtcgg

SEQ ID NO: 15 - DNA, 25 bp, Artificial Sequence
  Description of Artificial Sequence: Synthetic probe
ccgccgtcgtccaattcctgtgaaa

SEQ ID NO: 16 - DNA, 25 bp, Artificial Sequence
  Description of Artificial Sequence: Synthetic probe
gtataatgacccttatttactccag

SEQ ID NO: 17 - DNA, 25 bp, Artificial Sequence
  Description of Artificial Sequence: Synthetic probe
agtctacggtccctcctatttcgtc

SEQ ID NO: 18 - DNA, 25 bp, Artificial Sequence
  Description of Artificial Sequence: Synthetic probe
ctacaactccctcgtgtaaacacaa

SEQ ID NO: 19 - DNA, 25 bp, Artificial Sequence
  Description of Artificial Sequence: Synthetic probe
acgactgttccctcttagtggtgtc

SEQ ID NO: 20 - DNA, 25 bp, Artificial Sequence
  Description of Artificial Sequence: Synthetic probe
acgtcggtgaccctaagtcgaaggg

SEQ ID NO: 21 - DNA, 25 bp, Artificial Sequence
  Description of Artificial Sequence: Synthetic probe
acaagagatcctgaccctcttcgac

SEQ ID NO: 22 - DNA, 25 bp, Artificial Sequence
  Description of Artificial Sequence: Synthetic probe
aaagacgtctcctttgccctaccaa

SEQ ID NO: 23 - DNA, 25 bp, Artificial Sequence
  Description of Artificial Sequence: Synthetic probe
ctcaggatcctggtagacccgagac

SEQ ID NO: 24 - DNA, 25 bp, Artificial Sequence
  Description of Artificial Sequence: Synthetic probe
gggctctctccttcaccagtcgatt

SEQ ID NO: 25 - DNA, 25 bp, Artificial Sequence
  Description of Artificial Sequence: Synthetic probe
attccggtcctgtctctcaaattac

SEQ ID NO: 26 - DNA, 25 bp, Artificial Sequence
  Description of Artificial Sequence: Synthetic probe
aggtgccaccagtccatgtactacg

SEQ ID NO: 27 - DNA, 25 bp, Artificial Sequence
  Description of Artificial Sequence: Synthetic probe
ggaataaaccactaaactcggagac

SEQ ID NO: 28 - DNA, 25 bp, Artificial Sequence
  Description of Artificial Sequence: Synthetic probe
gaggtgacagtaccacccgaggaca

SEQ ID NO: 29 - DNA, 25 bp, Artificial Sequence
  Description of Artificial Sequence: Synthetic probe
gttctttctacctacccttttgagg

SEQ ID NO: 30 - DNA, 25 bp, Artificial Sequence
  Description of Artificial Sequence: Synthetic probe
ccgagtttccgatatctttatggtg

SEQ ID NO: 31 - DNA, 25 bp, Artificial Sequence
  Description of Artificial Sequence: Synthetic probe
aacggtgcaccgtgtcggaaggttt

SEQ ID NO: 32 - DNA, 25 bp, Artificial Sequence
  Description of Artificial Sequence: Synthetic probe
aggtcttgggagttcttattaggga

SEQ ID NO: 33 - DNA, 25 bp, Artificial Sequence
  Description of Artificial Sequence: Synthetic probe
ttaggaccggggtatcggactccct

SEQ ID NO: 34 - DNA, 25 bp, Artificial Sequence
  Description of Artificial Sequence: Synthetic probe
ataaatagggctagaaacttgtggt

SEQ ID NO: 35 - DNA, 25 bp, Artificial Sequence
  Description of Artificial Sequence: Synthetic probe
aaaacagtggcaggtcttagtgacc

SEQ ID NO: 36 - DNA, 25 bp, Artificial Sequence
  Description of Artificial Sequence: Synthetic probe
atccgacatggaccgcgtctccgga

SEQ ID NO: 37 - DNA, 25 bp, Artificial Sequence
  Description of Artificial Sequence: Synthetic probe
atttttggtggatgaccgatggtac

SEQ ID NO: 38 - DNA, 25 bp, Artificial Sequence
  Description of Artificial Sequence: Synthetic probe
acgtcaattggtcataaactccaga

SEQ ID NO: 39 - DNA, 25 bp, Artificial Sequence
  Description of Artificial Sequence: Synthetic probe
aaattgtggttgagtcgttctctag

SEQ ID NO: 40 - DNA, 25 bp, Artificial Sequence
  Description of Artificial Sequence: Synthetic probe
agagtccctaggatcacagaccatc

SEQ ID NO: 41 - DNA, 25 bp, Artificial Sequence
  Description of Artificial Sequence: Synthetic probe
gacttagtagaaggttttctaaaga

SEQ ID NO: 42 - DNA, 25 bp, Artificial Sequence
  Description of Artificial Sequence: Synthetic probe
agctccagaggttcaccctgtttgg

SEQ ID NO: 43 - DNA, 25 bp, Artificial Sequence
  Description of Artificial Sequence: Synthetic probe
acaggtgaaggtcttttctcggcgg

SEQ ID NO: 44 - DNA, 25 bp, Artificial Sequence
  Description of Artificial Sequence: Synthetic probe
catgtatacgaggtggaattggaac

SEQ ID NO: 45 - DNA, 25 bp, Artificial Sequence
  Description of Artificial Sequence: Synthetic probe
ttggtactgaggtaaacagtcagac

SEQ ID NO: 46 - DNA, 25 bp, Artificial Sequence
  Description of Artificial Sequence: Synthetic probe
atataaaacggtagcgagtgggctt

SEQ ID NO: 47 - DNA, 25 bp, Artificial Sequence
  Description of Artificial Sequence: Synthetic probe
ttaccggagaagagctaagacgttg

SEQ ID NO: 48 - DNA, 25 bp, Artificial Sequence
  Description of Artificial Sequence: Synthetic probe
ctccaagaagtttgaggcccgtatt

SEQ ID NO: 49 - DNA, 25 bp, Artificial Sequence
  Description of Artificial Sequence: Synthetic probe
gtcaggtattacaacatcaatgcct

SEQ ID NO: 50 - DNA, 25 bp, Artificial Sequence
  Description of Artificial Sequence: Synthetic probe
ataacgcccactactactgtccgag

SEQ ID NO: 51 - DNA, 25 bp, Artificial Sequence
  Description of Artificial Sequence: Synthetic probe
atactgactaagaacggcaactctg

SEQ ID NO: 52 - DNA, 25 bp, Artificial Sequence
  Description of Artificial Sequence: Synthetic probe
ctggtttttactgtcccgtttcgct

SEQ ID NO: 53 - DNA, 25 bp, Artificial Sequence
  Description of Artificial Sequence: Synthetic probe
gttattatttattcccactgcccga

SEQ ID NO: 54 - DNA, 25 bp, Artificial Sequence
  Description of Artificial Sequence: Synthetic probe
ttgtgtaccctagatccctgacagt

SEQ ID NO: 55 - DNA, 25 bp, Artificial Sequence
  Description of Artificial Sequence: Synthetic probe
cgtaaacgccgtcgagatggtgact

SEQ ID NO: 56 - DNA, 25 bp, Artificial Sequence
  Description of Artificial Sequence: Synthetic probe
cccaggagcagtggcaaactcagct

SEQ ID NO: 57 - DNA, 25 bp, Artificial Sequence
  Description of Artificial Sequence: Synthetic probe
ctcctcctagggctgaaggaaggtg

SEQ ID NO: 58 - DNA, 25 bp, Artificial Sequence
  Description of Artificial Sequence: Synthetic probe
gtcggagaagagtcagccagaaaag

SEQ ID NO: 59 - DNA, 25 bp, Artificial Sequence
  Description of Artificial Sequence: Synthetic probe
atcacaacagtctactcggtgagtg

SEQ ID NO: 60 - DNA, 25 bp, Artificial Sequence
  Description of Artificial Sequence: Synthetic probe
ttggtcgccaatgactcaagtcggt

SEQ ID NO: 61 - DNA, 25 bp, Artificial Sequence
  Description of Artificial Sequence: Synthetic probe
gtgttcaatcgttgtatgttcgtgt

SEQ ID NO: 62 - DNA, 25 bp, Artificial Sequence
  Description of Artificial Sequence: Synthetic probe
attatcgtaaatgcatcaccgtctt

SEQ ID NO: 63 - DNA, 25 bp, Artificial Sequence
  Description of Artificial Sequence: Synthetic probe
ataccaggttccaatcactttcagg

SEQ ID NO: 64 - DNA, 25 bp, Artificial Sequence
  Description of Artificial Sequence: Synthetic probe
gtaggattcacgtaccaccggagtc

SEQ ID NO: 65 - DNA, 25 bp, Artificial Sequence
  Description of Artificial Sequence: Synthetic probe
atcaatactctatctgcgcgtggtg

SEQ ID NO: 66 - DNA, 25 bp, Artificial Sequence
  Description of Artificial Sequence: Synthetic probe
ataggacccaccgtgtcaggtaggt

SEQ ID NO: 67 - DNA, 25 bp, Artificial Sequence
  Description of Artificial Sequence: Synthetic probe
atggaaggtaaatgatcgacccact

SEQ ID NO: 68 - DNA, 25 bp, Artificial Sequence
  Description of Artificial Sequence: Synthetic probe
ctagaattgtgactacagagcccgt

SEQ ID NO: 69 - DNA, 25 bp, Artificial Sequence
  Description of Artificial Sequence: Synthetic probe
cttttatggaacgtactctggtgac

SEQ ID NO: 70 - DNA, 25 bp, Artificial Sequence
  Description of Artificial Sequence: Synthetic probe
agaagtagtgaatctgagaggtcgc

SEQ ID NO: 71 - DNA, 25 bp, Artificial Sequence
  Description of Artificial Sequence: Synthetic probe
agacgagtgtgttaaaagggtcgtc

SEQ ID NO: 72 - skipped

SEQ ID NO: 73 - DNA, 25 bp, Artificial Sequence
  Description of Artificial Sequence: Synthetic probe
agggtaggcctccggtacgattaca

SEQ ID NO: 74 - skipped

SEQ ID NO: 75 - DNA, 25 bp, Artificial Sequence
  Description of Artificial Sequence: Synthetic probe
aggaaagaagtacggaagagtaacg

SEQ ID NO: 76 - DNA, 25 bp, Artificial Sequence
  Description of Artificial Sequence: Synthetic probe
ggcctagagtggttccctgaggacc

SEQ ID NO: 77 - DNA, 25 bp, Artificial Sequence
  Description of Artificial Sequence: Synthetic probe
gtgtattctaacatcgtggtcgtcg

SEQ ID NO: 78 - DNA, 25 bp, Artificial Sequence
  Description of Artificial Sequence: Synthetic probe
actaaatgtacacgtcgttgttacc

SEQ ID NO: 79 - DNA, 25 bp, Artificial Sequence
  Description of Artificial Sequence: Synthetic probe
gtcaccagggacgtaggcctccctc

SEQ ID NO: 80 - DNA, 25 bp, Artificial Sequence
  Description of Artificial Sequence: Synthetic probe
ccttggggcacctataatacgtcgc

SEQ ID NO: 81 - DNA, 25 bp, Artificial Sequence
  Description of Artificial Sequence: Synthetic probe
agccgaagagttcgccgttcaccga

SEQ ID NO: 82 - DNA, 25 bp, Artificial Sequence
  Description of Artificial Sequence: Synthetic probe
cggggtttcttctgtagaccaccca

SEQ ID NO: 83 - DNA, 25 bp, Artificial Sequence
  Description of Artificial Sequence: Synthetic probe
aggactcccaataaacacggtgtgg

SEQ ID NO: 84 - DNA, 25 bp, Artificial Sequence
  Description of Artificial Sequence: Synthetic probe
gtgaacctgtcttgtcagtccgtcg

SEQ ID NO: 85 - DNA, 25 bp, Artificial Sequence
  Description of Artificial Sequence: Synthetic probe
gtacgtcctcccttttcaggtcatg

SEQ ID NO: 86 - DNA, 25 bp, Artificial Sequence
  Description of Artificial Sequence: Synthetic probe
acttaaagaggtgctagacgcgtcc

SEQ ID NO: 87 - DNA, 25 bp, Artificial Sequence
  Description of Artificial Sequence: Synthetic probe
ctacgtgtagttttcgtatcggggt

SEQ ID NO: 88 - DNA, 25 bp, Artificial Sequence
  Description of Artificial Sequence: Synthetic probe
aagtacccgaggcagttcctcttga

SEQ ID NO: 89 - DNA, 25 bp, Artificial Sequence
  Description of Artificial Sequence: Synthetic probe
ccaactcatttgtaaccgttcgaca

SEQ ID NO: 90 - DNA, 25 bp, Artificial Sequence
  Description of Artificial Sequence: Synthetic probe
aggggtatggtatgattcattgagt

SEQ ID NO: 91 - DNA, 25 bp, Artificial Sequence
  Description of Artificial Sequence: Synthetic probe
caatcctatttaggttgctgatcgg

SEQ ID NO: 92 - DNA, 25 bp, Artificial Sequence
  Description of Artificial Sequence: Synthetic probe
ctctgtgtaggtacttaaacgctac

SEQ ID NO: 93 - DNA, 25 bp, Artificial Sequence
  Description of Artificial Sequence: Synthetic probe
tatttgaagggtagacctcgtccgg

SEQ ID NO: 94 - DNA, 25 bp, Artificial Sequence
  Description of Artificial Sequence: Synthetic probe
gtaaaagacctttgtgtattagcat

SEQ ID NO: 95 - DNA, 25 bp, Artificial Sequence
  Description of Artificial Sequence: Synthetic probe
aaggacttctggacgagcgtgtgac

SEQ ID NO: 96 - DNA, 25 bp, Artificial Sequence
  Description of Artificial Sequence: Synthetic probe
cggaaaaagctgtggtctctcaagt

SEQ ID NO: 97 - DNA, 25 bp, Artificial Sequence
  Description of Artificial Sequence: Synthetic probe
accgttccctttggtcatgaggggt

SEQ ID NO: 98 - DNA, 25 bp, Artificial Sequence
  Description of Artificial Sequence: Synthetic probe
agaggctctttacccttcgtctttc

SEQ ID NO: 99 - DNA, 25 bp, Artificial Sequence
  Description of Artificial Sequence: Synthetic probe
actcaacaaatgtcgggtggtcctc

SEQ ID NO: 100 - DNA, 25 bp, Artificial Sequence
  Description of Artificial Sequence: Synthetic probe
aaggggtactccctctccgtgacct

SEQ ID NO: 101 - DNA, 25 bp, Artificial Sequence
  Description of Artificial Sequence: Synthetic probe
agtgtaccaggactctgttgtatgt

SEQ ID NO: 102 - DNA, 25 bp, Artificial Sequence
  Description of Artificial Sequence: Synthetic probe
ccacctcgaagagggcccttcggtg

SEQ ID NO: 103 - DNA, 25 bp, Artificial Sequence
  Description of Artificial Sequence: Synthetic probe
accaatgaccttgggaagcagacgt

SEQ ID NO: 104 - DNA, 25 bp, Artificial Sequence
  Description of Artificial Sequence: Synthetic probe
ataataatgtccgtatgaaacctcg

SEQ ID NO: 105 - DNA, 25 bp, Artificial Sequence
  Description of Artificial Sequence: Synthetic probe
gtatcagagacgagacagcaaagtg

SEQ ID NO: 106 - DNA, 25 bp, Artificial Sequence
  Description of Artificial Sequence: Synthetic probe
atctactcccctacccaattgtctt

SEQ ID NO: 107 - skipped

SEQ ID NO: 108 - DNA, 25 bp, Artificial Sequence
  Description of Artificial Sequence: Synthetic probe
gtaatttctttggatctggtagtag

SEQ ID NO: 109 - DNA, 25 bp, Artificial Sequence
  Description of Artificial Sequence: Synthetic probe
attgacatctcccatagctgacgtt

SEQ ID NO: 110 - DNA, 25 bp, Artificial Sequence
  Description of Artificial Sequence: Synthetic probe
gaaacggcggaagcaccagtggcct

SEQ ID NO: 111 - DNA, 25 bp, Artificial Sequence
  Description of Artificial Sequence: Synthetic probe
aagaagaccgggtgcttccggaccc

SEQ ID NO: 112 - DNA, 25 bp, Artificial Sequence
  Description of Artificial Sequence: Synthetic probe
aactactatctcttattgcaggtgg

SEQ ID NO: 113 - DNA, 25 bp, Artificial Sequence
  Description of Artificial Sequence: Synthetic probe
gactaaccgggtctgaatccaccca

SEQ ID NO: 114 - DNA, 25 bp, Artificial Sequence
  Description of Artificial Sequence: Synthetic probe
gtagttcttgacagagggtccgtcg

SEQ ID NO: 115 - DNA, 25 bp, Artificial Sequence
  Description of Artificial Sequence: Synthetic probe
caaagacctgagtttcccacgagga

SEQ ID NO: 116 - DNA, 25 bp, Artificial Sequence
  Description of Artificial Sequence: Synthetic probe
cgaccacctcgtgaactctgtatga

SEQ ID NO: 117 - DNA, 25 bp, Artificial Sequence
  Description of Artificial Sequence: Synthetic probe
ctgcctctgtcacgtcgggacgcgt

SEQ ID NO: 118 - skipped

SEQ ID NO: 119 - DNA, 25 bp, Artificial Sequence
  Description of Artificial Sequence: Synthetic probe
ctgtacccgtcgataaacattttac

SEQ ID NO: 120 - DNA, 25 bp, Artificial Sequence
  Description of Artificial Sequence: Synthetic probe
atctgttcgggacggactcttctac

SEQ ID NO: 121 - DNA, 25 bp, Artificial Sequence
  Description of Artificial Sequence: Synthetic probe
gagatcacatcactgcatccctcgg

SEQ ID NO: 122 - DNA, 25 bp, Artificial Sequence
  Description of Artificial Sequence: Synthetic probe
ggtcaaagtagtctttagtgcaagt

SEQ ID NO: 123 - DNA, 25 bp, Artificial Sequence
  Description of Artificial Sequence: Synthetic probe
tacgtgttcctggaggctgacgtgc

SEQ ID NO: 124 - DNA, 25 bp, Artificial Sequence
  Description of Artificial Sequence: Synthetic probe
cgtcgtcgccgagagtatcatcatc

SEQ ID NO: 125 - DNA, 25 bp, Artificial Sequence
  Description of Artificial Sequence: Synthetic probe
ggtcctccttttctcgagccagttg

SEQ ID NO: 126 - DNA, 25 bp, Artificial Sequence
  Description of Artificial Sequence: Synthetic probe
ccgactaaaattgtcctttccaact

SEQ ID NO: 127 - DNA, 25 bp, Artificial Sequence
  Description of Artificial Sequence: Synthetic probe
ctgtcaaaagaaagtcacctaacct

SEQ ID NO: 128 - DNA, 25 bp, Artificial Sequence
  Description of Artificial Sequence: Synthetic probe
cccgggtccgaggtaataactatat

SEQ ID NO: 129 - DNA, 25 bp, Artificial Sequence
  Description of Artificial Sequence: Synthetic probe
cagtacagaccatcaagtagacggt

SEQ ID NO: 130 - DNA, 25 bp, Artificial Sequence
  Description of Artificial Sequence: Synthetic probe
ctccagggtggtcatctcaagaact

SEQ ID NO: 131 - DNA, 25 bp, Artificial Sequence
  Description of Artificial Sequence: Synthetic probe
ctcaacgtttggtagcctgttcccg

SEQ ID NO: 132 - skipped

SEQ ID NO: 133 - DNA, 25 bp, Artificial Sequence
  Description of Artificial Sequence: Synthetic probe
cttcacgagtactgagggttagacg

SEQ ID NO: 134 - DNA, 25 bp, Artificial Sequence
  Description of Artificial Sequence: Synthetic probe
atgtggcgtgctgggtaaaaatacc

SEQ ID NO: 135 - DNA, 25 bp, Artificial Sequence
  Description of Artificial Sequence: Synthetic probe
tccgttgttgtgactctgaggagga

SEQ ID NO: 136 - DNA, 25 bp, Artificial Sequence
  Description of Artificial Sequence: Synthetic probe
atctaatatgggtgtttgtcgtgac

SEQ ID NO: 137 - skipped

SEQ ID NO: 138 - DNA, 25 bp, Artificial Sequence
  Description of Artificial Sequence: Synthetic probe
atacttttcttcgtagtgtgacgtc

SEQ ID NO: 139 - DNA, 25 bp, Artificial Sequence
  Description of Artificial Sequence: Synthetic probe
agaaaattgacccttcgtgtaaagt

SEQ ID NO: 140 - DNA, 25 bp, Artificial Sequence
  Description of Artificial Sequence: Synthetic probe
atatgtctcgtgtgtagagtacccg

SEQ ID NO: 141 - DNA, 25 bp, Artificial Sequence
  Description of Artificial Sequence: Synthetic probe
cgccggcccgctgcccgcggcctcg

SEQ ID NO: 142 - DNA, 25 bp, Artificial Sequence
  Description of Artificial Sequence: Synthetic probe
gttcaccctagtcatgacgggaaga

SEQ ID NO: 143 - DNA, 25 bp, Artificial Sequence
  Description of Artificial Sequence: Synthetic probe
aaatgatagtcttctggtcgtgtcc

SEQ ID NO: 144 - DNA, 25 bp, Artificial Sequence
  Description of Artificial Sequence: Synthetic probe
atgaaggaccgacttataaccggta

SEQ ID NO: 145 - DNA, 25 bp, Artificial Sequence
  Description of Artificial Sequence: Synthetic probe
gtatcgaccacaatcctctcactga

SEQ ID NO: 146 - DNA, 25 bp, Artificial Sequence
  Description of Artificial Sequence: Synthetic probe
actgtagactcgtgctgttccgatc

SEQ ID NO: 147 - DNA, 25 bp, Artificial Sequence
  Description of Artificial Sequence: Synthetic probe
taagtcagggaagtgtcctgtgcac

SEQ ID NO: 148 - DNA, 25 bp, Artificial Sequence
  Description of Artificial Sequence: Synthetic probe
gagacggaggtttgcctaagcccta

SEQ ID NO: 149 - DNA, 25 bp, Artificial Sequence
  Description of Artificial Sequence: Synthetic probe
gttctcttgggtctagtcgttccgt

SEQ ID NO: 150 - DNA, 25 bp, Artificial Sequence
  Description of Artificial Sequence: Synthetic probe
gggggctcaagccgcgctgggctcg

SEQ ID NO: 151 - DNA, 25 bp, Artificial Sequence
  Description of Artificial Sequence: Synthetic probe
gaaatagagtaaacttgactccctc

SEQ ID NO: 152 - DNA, 25 bp, Artificial Sequence
  Description of Artificial Sequence: Synthetic probe
atttgtcctttgagccgtgccccgt

SEQ ID NO: 153 - DNA, 25 bp, Artificial Sequence
  Description of Artificial Sequence: Synthetic probe
ctttcatggatgttccgagtgtcct

SEQ ID NO: 154 - DNA, 25 bp, Artificial Sequence
  Description of Artificial Sequence: Synthetic probe
ggagagactcccaggctcccgggcg

SEQ ID NO: 155 - DNA, 25 bp, Artificial Sequence
  Description of Artificial Sequence: Synthetic probe
acgtaactcgtggaagaccctgccc

SEQ ID NO: 156 - DNA, 25 bp, Artificial Sequence
  Description of Artificial Sequence: Synthetic probe
cttcttttcaccattcaggagtcga

SEQ ID NO: 157 - DNA, 25 bp, Artificial Sequence
  Description of Artificial Sequence: Synthetic probe
attattcactaatgcaccggagggt

SEQ ID NO: 158 - DNA, 25 bp, Artificial Sequence
  Description of Artificial Sequence: Synthetic probe
agacctcctttaggtggtcgtccac

SEQ ID NO: 159 - DNA, 25 bp, Artificial Sequence
  Description of Artificial Sequence: Synthetic probe
aggctctacccgaggtggaactaga

SEQ ID NO: 160 - DNA, 25 bp, Artificial Sequence
  Description of Artificial Sequence: Synthetic probe
tcagtggtgggtctttaacaggctc

SEQ ID NO: 161 - DNA, 25 bp, Artificial Sequence
  Description of Artificial Sequence: Synthetic probe
ctctctcctccacccccctcttcgc

SEQ ID NO: 162 - DNA, 25 bp, Artificial Sequence
  Description of Artificial Sequence: Synthetic probe
aaagttttgagttccctgacggtcg

SEQ ID NO: 163 - DNA, 25 bp, Artificial Sequence
  Description of Artificial Sequence: Synthetic probe
ctacttcaatttattcgtttccatg

SEQ ID NO: 164 - DNA, 25 bp, Artificial Sequence
  Description of Artificial Sequence: Synthetic probe
ccggattaatgtccgtgattgacac

SEQ ID NO: 165 - DNA, 25 bp, Artificial Sequence
  Description of Artificial Sequence: Synthetic probe
tcatgtacacgatttcttcacccgt

SEQ ID NO: 166 - DNA, 25 bp, Artificial Sequence
  Description of Artificial Sequence: Synthetic probe
cgtttaagtcattgcgtccgtggtt

SEQ ID NO: 167 - DNA, 25 bp, Artificial Sequence
  Description of Artificial Sequence: Synthetic probe
aaattctggggttctgtttagtggt

SEQ ID NO: 168 - DNA, 25 bp, Artificial Sequence
  Description of Artificial Sequence: Synthetic probe
agtttaagaggactgaagtgcggac

SEQ ID NO: 169 - DNA, 25 bp, Artificial Sequence
  Description of Artificial Sequence: Synthetic probe
ccgaaaccgctgacgcgatgagggc

SEQ ID NO: 170 - DNA, 25 bp, Artificial Sequence
  Description of Artificial Sequence: Synthetic probe
gtccgaggagtaccactagaagggt

SEQ ID NO: 171 - DNA, 25 bp, Artificial Sequence
  Description of Artificial Sequence: Synthetic probe
actcacgcggtttcaagttgttcgg

SEQ ID NO: 172 - DNA, 25 bp, Artificial Sequence
  Description of Artificial Sequence: Synthetic probe
gtctcactcagaacatcaccctttt

SEQ ID NO: 173 - DNA, 25 bp, Artificial Sequence
  Description of Artificial Sequence: Synthetic probe
gttatttgtcttagtagtatcgtca

SEQ ID NO: 174 - DNA, 25 bp, Artificial Sequence
  Description of Artificial Sequence: Synthetic probe
agcatgaaccaggaggtgacccgtt

SEQ ID NO: 175 - DNA, 25 bp, Artificial Sequence
  Description of Artificial Sequence: Synthetic probe
gtacagttccgttgcgaataaccgg

SEQ ID NO: 176 - DNA, 25 bp, Artificial Sequence
  Description of Artificial Sequence: Synthetic probe
gtatgacttcatcccttgttctggt

SEQ ID NO: 177 - DNA, 25 bp, Artificial Sequence
  Description of Artificial Sequence: Synthetic probe
cttttgtagagtccgcagtagttga

SEQ ID NO: 178 - DNA, 25 bp, Artificial Sequence
  Description of Artificial Sequence: Synthetic probe
cgaatgcagtccgttgtttgagttt

SEQ ID NO: 179 - DNA, 25 bp, Artificial Sequence
  Description of Artificial Sequence: Synthetic probe
aaaattcaggttccatggtagacgg

SEQ ID NO: 180 - DNA, 25 bp, Artificial Sequence
  Description of Artificial Sequence: Synthetic probe
gtacccaccatgtttgtccatctgt

SEQ ID NO: 181 - DNA, 25 bp, Artificial Sequence
  Description of Artificial Sequence: Synthetic probe
ccgagcctgcgtggaaggcgcttcc

SEQ ID NO: 182 - DNA, 25 bp, Artificial Sequence
  Description of Artificial Sequence: Synthetic probe
ccaaagtggtatagggtgacagaca

SEQ ID NO: 183 - DNA, 25 bp, Artificial Sequence
  Description of Artificial Sequence: Synthetic probe
attcttcttggactcttgtgtactc

SEQ ID NO: 184 - DNA, 25 bp, Artificial Sequence
  Description of Artificial Sequence: Synthetic probe
gtctacaaagaaatcgactctgtgt

SEQ ID NO: 185 - DNA, 25 bp, Artificial Sequence
  Description of Artificial Sequence: Synthetic probe
acaacttgttggcagtcggaccgag

SEQ ID NO: 186 - DNA, 25 bp, Artificial Sequence
  Description of Artificial Sequence: Synthetic probe
tttgattgggtgtatgacgggaacc

SEQ ID NO: 187 - DNA, 25 bp, Artificial Sequence
  Description of Artificial Sequence: Synthetic probe
acgtgacggaacttaaggtagacat

SEQ ID NO: 188 - DNA, 25 bp, Artificial Sequence
  Description of Artificial Sequence: Synthetic probe
cgagcgcgggcggaaacaatcaaag

SEQ ID NO: 189 - DNA, 25 bp, Artificial Sequence
  Description of Artificial Sequence: Synthetic probe
ggttccacgcttttcttgatcgacg

SEQ ID NO: 190 - DNA, 25 bp, Artificial Sequence
  Description of Artificial Sequence: Synthetic probe
cacggttgtaactccctccgcgtag

SEQ ID NO: 191 - DNA, 25 bp, Artificial Sequence
  Description of Artificial Sequence: Synthetic probe
agatgctttaacagaagacccggac

SEQ ID NO: 192 - DNA, 25 bp, Artificial Sequence
  Description of Artificial Sequence: Synthetic probe
gtatcgccagtgtgtagacgtagtg

SEQ ID NO: 193 - DNA, 25 bp, Artificial Sequence
  Description of Artificial Sequence: Synthetic probe
ctagacggccagtatgacacggcgg

SEQ ID NO: 194 - DNA, 25 bp, Artificial Sequence
  Description of Artificial Sequence: Synthetic probe
acagaagtaaagctttgtgtcgggt

SEQ ID NO: 195 - DNA, 25 bp, Artificial Sequence
  Description of Artificial Sequence: Synthetic probe
atgttgaaggggtttagctctgttc

SEQ ID NO: 196 - DNA, 25 bp, Artificial Sequence
  Description of Artificial Sequence: Synthetic probe
tctcccgtcggtccttcatgtacta

SEQ ID NO: 197 - DNA, 25 bp, Artificial Sequence
  Description of Artificial Sequence: Synthetic probe
acggtcacagaggaattatgaagaa

SEQ ID NO: 198 - DNA, 25 bp, Artificial Sequence
  Description of Artificial Sequence: Synthetic probe
cttagtacttctgtttcctggtcgc

SEQ ID NO: 199 - DNA, 25 bp, Artificial Sequence
  Description of Artificial Sequence: Synthetic probe
gtcgagttggggtacttgagtcaca

SEQ ID NO: 200 - DNA, 25 bp, Artificial Sequence
  Description of Artificial Sequence: Synthetic probe
aacggcggaagcaccagtggccttg

SEQ ID NO: 201 - DNA, 25 bp, Artificial Sequence
  Description of Artificial Sequence: Synthetic probe
cattaatcaatattgctttaagtat

SEQ ID NO: 202 - DNA, 25 bp, Artificial Sequence
  Description of Artificial Sequence: Synthetic probe
atgtacttttgtgccgttgaggtcc

SEQ ID NO: 203 - DNA, 25 bp, Artificial Sequence
  Description of Artificial Sequence: Synthetic probe
cgcacttgagcaacgacttcggttt

SEQ ID NO: 204 - DNA, 25 bp, Artificial Sequence
  Description of Artificial Sequence: Synthetic probe
gtaacacgcaattgtcaccgagtct

SEQ ID NO: 205 - DNA, 25 bp, Artificial Sequence
  Description of Artificial Sequence: Synthetic probe
ggaacgtcttctgcggcatgctcca

SEQ ID NO: 206 - DNA, 25 bp, Artificial Sequence
  Description of Artificial Sequence: Synthetic probe
attgtataattcttgaacctcctcc

SEQ ID NO: 207 - DNA, 25 bp, Artificial Sequence
  Description of Artificial Sequence: Synthetic probe
gttattcgagtacaagggtaggtca

SEQ ID NO: 208 - DNA, 25 bp, Artificial Sequence
  Description of Artificial Sequence: Synthetic probe
gttctacaagacctttcctcggcgc

SEQ ID NO: 209 - DNA, 25 bp, Artificial Sequence
  Description of Artificial Sequence: Synthetic probe
accaaggtaacacctttgtgaccgt

SEQ ID NO: 210 - DNA, 25 bp, Artificial Sequence
  Description of Artificial Sequence: Synthetic probe
tgtcaccactgagtagtctcccgct

SEQ ID NO: 211 - DNA, 25 bp, Artificial Sequence
  Description of Artificial Sequence: Synthetic probe
ctttagacattgaccggcactattt

SEQ ID NO: 212 - DNA, 25 bp, Artificial Sequence
  Description of Artificial Sequence: Synthetic probe
ttgattcccactctggttctggata

SEQ ID NO: 213 - DNA, 25 bp, Artificial Sequence
  Description of Artificial Sequence: Synthetic probe
aaatgtcctaccttcgttcagtcgg

SEQ ID NO: 214 - DNA, 25 bp, Artificial Sequence
  Description of Artificial Sequence: Synthetic probe
acttggcgggtcagaaactggactc

SEQ ID NO: 215 - DNA, 25 bp, Artificial Sequence
  Description of Artificial Sequence: Synthetic probe
atctggctaagaaatcgaaggacgt

SEQ ID NO: 216 - DNA, 25 bp, Artificial Sequence
  Description of Artificial Sequence: Synthetic probe
ccgctgtgtagacaggatgatctct

SEQ ID NO: 217 - DNA, 25 bp, Artificial Sequence
  Description of Artificial Sequence: Synthetic probe
gaatatgaccgacttttttgaaacg

SEQ ID NO: 218 - DNA, 25 bp, Artificial Sequence
  Description of Artificial Sequence: Synthetic probe
acaccgatagttgtcatctagacca

SEQ ID NO: 219 - DNA, 25 bp, Artificial Sequence
  Description of Artificial Sequence: Synthetic probe
aatatgtttcagtttcggagggtcg

SEQ ID NO: 220 - DNA, 25 bp, Artificial Sequence
  Description of Artificial Sequence: Synthetic probe
acttaactaagagtgtcccggacga

SEQ ID NO: 221 - DNA, 25 bp, Artificial Sequence
  Description of Artificial Sequence: Synthetic probe
cttcataggcaatgtcgaccgctgc

SEQ ID NO: 222 - DNA, 25 bp, Artificial Sequence
  Description of Artificial Sequence: Synthetic probe
ctccaatttcggctgtcgtcgtcaa

SEQ ID NO: 223 - DNA, 25 bp, Artificial Sequence
  Description of Artificial Sequence: Synthetic probe
gtacatcggctgacaaggttgagaa

SEQ ID NO: 224 - DNA, 25 bp, Artificial Sequence
  Description of Artificial Sequence: Synthetic probe
agttatacgaattgtgacccggtgc

SEQ ID NO: 225 - DNA, 25 bp, Artificial Sequence
  Description of Artificial Sequence: Synthetic probe
agacgacgtcccttattcttgaaag

SEQ ID NO: 226 - DNA, 25 bp, Artificial Sequence
  Description of Artificial Sequence: Synthetic probe
gtaaatccaagaagtgaccctgaca

SEQ ID NO: 227 - DNA, 25 bp, Artificial Sequence
  Description of Artificial Sequence: Synthetic probe
ctgaagtacctaggttattcgtgct

SEQ ID NO: 228 - DNA, 25 bp, Artificial Sequence
  Description of Artificial Sequence: Synthetic probe
gactctagtactgaggtttaattct

SEQ ID NO: 229 - skipped

SEQ ID NO: 230 - DNA, 25 bp, Artificial Sequence
  Description of Artificial Sequence: Synthetic probe
cttctccggtttttagtagtcgact

SEQ ID NO: 231 - DNA, 25 bp, Artificial Sequence
  Description of Artificial Sequence: Synthetic probe
gcctccgcgggtggtacttcatcca

SEQ ID NO: 232 - DNA, 25 bp, Artificial Sequence
  Description of Artificial Sequence: Synthetic probe
gtaacttgaacaggtttaaccaccc

SEQ ID NO: 233 - DNA, 25 bp, Artificial Sequence
  Description of Artificial Sequence: Synthetic probe
agaagctgacgtagaaaaggatcaa

SEQ ID NO: 234 - DNA, 25 bp, Artificial Sequence
  Description of Artificial Sequence: Synthetic probe
ctctgcatcaggtccgactccatgt

SEQ ID NO: 235 - DNA, 25 bp, Artificial Sequence
  Description of Artificial Sequence: Synthetic probe
ctaggtcggccttcactgtttttct

SEQ ID NO: 236 - DNA, 25 bp, Artificial Sequence
  Description of Artificial Sequence: Synthetic probe
gtttactcgcaatttgtgggttagt

SEQ ID NO: 237 - DNA, 25 bp, Artificial Sequence
  Description of Artificial Sequence: Synthetic probe
gtatattaggacctttgctgaggtt

SEQ ID NO: 238 - DNA, 25 bp, Artificial Sequence
  Description of Artificial Sequence: Synthetic probe
acaaaaaaggtgtagtatgacaggt

SEQ ID NO: 239 - DNA, 25 bp, Artificial Sequence
  Description of Artificial Sequence: Synthetic probe
gtagttcaatcccactcagtagggc

SEQ ID NO: 240 - skipped

SEQ ID NO: 241 - DNA, 25 bp, Artificial Sequence
  Description of Artificial Sequence: Synthetic probe
atctgtggcatcgtgtacgagtttg

SEQ ID NO: 242 - DNA, 25 bp, Artificial Sequence
  Description of Artificial Sequence: Synthetic probe
ctctcgaaacaaaaatgaagtctgt

SEQ ID NO: 243 - DNA, 25 bp, Artificial Sequence
  Description of Artificial Sequence: Synthetic probe
attgaggtcagaacatgaacagtgt

SEQ ID NO: 244 - DNA, 25 bp, Artificial Sequence
  Description of Artificial Sequence: Synthetic probe
ttgacggtccaaccctttaaggagc

SEQ ID NO: 245 - DNA, 25 bp, Artificial Sequence
  Description of Artificial Sequence: Synthetic probe
agaccacctatacctcgtcttgagg

SEQ ID NO: 246 - DNA, 25 bp, Artificial Sequence
  Description of Artificial Sequence: Synthetic probe
gcaatcgtctgtcgttttgtacttt

SEQ ID NO: 247 - DNA, 25 bp, Artificial Sequence
  Description of Artificial Sequence: Synthetic probe
ccgaaaacatggtccagtaagaaat

SEQ ID NO: 248 - DNA, 25 bp, Artificial Sequence
  Description of Artificial Sequence: Synthetic probe
ggatccatgagaagaacaaacagtt

SEQ ID NO: 249 - DNA, 25 bp, Artificial Sequence
  Description of Artificial Sequence: Synthetic probe
tttccgtagaagttggttgtccgtt

SEQ ID NO: 250 - DNA, 25 bp, Artificial Sequence
  Description of Artificial Sequence: Synthetic probe
agggctttacacagaccagggtttc

SEQ ID NO: 251 - DNA, 25 bp, Artificial Sequence
  Description of Artificial Sequence: Synthetic probe
agtctttcgtgaattctgtcggtga

SEQ ID NO: 252 - DNA, 25 bp, Artificial Sequence
  Description of Artificial Sequence: Synthetic probe
aataacacccagtcgaaccgccggt

SEQ ID NO: 253 - DNA, 25 bp, Artificial Sequence
  Description of Artificial Sequence: Synthetic probe
acttctaatctgtggaagggaccga

SEQ ID NO: 254 - DNA, 25 bp, Artificial Sequence
  Description of Artificial Sequence: Synthetic probe
accgttacgggcactaccacggcgg

SEQ ID NO: 255 - DNA, 25 bp, Artificial Sequence
  Description of Artificial Sequence: Synthetic probe
atagcttagacacttcggcgacaga

SEQ ID NO: 256 - DNA, 25 bp, Artificial Sequence
  Description of Artificial Sequence: Synthetic probe
aagaacttcaacagaatgttagtgg

SEQ ID NO: 257 - DNA, 25 bp, Artificial Sequence
  Description of Artificial Sequence: Synthetic probe
acaattatttggtcccgcccactgt

SEQ ID NO: 258 - DNA, 25 bp, Artificial Sequence
  Description of Artificial Sequence: Synthetic probe
agacagatcatggtgtccagtactc

SEQ ID NO: 259 - DNA, 25 bp, Artificial Sequence
  Description of Artificial Sequence: Synthetic probe
actcctcgtaaagtgtccagtgcgg

SEQ ID NO: 260 - DNA, 25 bp, Artificial Sequence
  Description of Artificial Sequence: Synthetic probe
acatggcgatggacccgcttcgcga

SEQ ID NO: 261 - DNA, 25 bp, Artificial Sequence
  Description of Artificial Sequence: Synthetic probe
aagtctccgaggttgtaaagtctgt

SEQ ID NO: 262 - DNA, 25 bp, Artificial Sequence
  Description of Artificial Sequence: Synthetic probe
aaaaactttgacgacctactcaagt

SEQ ID NO: 263 - DNA, 25 bp, Artificial Sequence
  Description of Artificial Sequence: Synthetic probe
agaggagtctttttgcatcaacagg

SEQ ID NO: 264 - DNA, 25 bp, Artificial Sequence
  Description of Artificial Sequence: Synthetic probe
atcgagtcgagttgtacctaagtgg

SEQ ID NO: 265 - DNA, 25 bp, Artificial Sequence
  Description of Artificial Sequence: Synthetic probe
attggataataacacgtcgtccgga

SEQ ID NO: 266 - DNA, 25 bp, Artificial Sequence
  Description of Artificial Sequence: Synthetic probe
agtccataggactgggtgccagaac

SEQ ID NO: 267 - DNA, 25 bp, Artificial Sequence
  Description of Artificial Sequence: Synthetic probe
acatagtttgagacggagcctttcc

SEQ ID NO: 268 - DNA, 25 bp, Artificial Sequence
  Description of Artificial Sequence: Synthetic probe
ctcttgtgtgataaggtcttgtctc

SEQ ID NO: 269 - DNA, 25 bp, Artificial Sequence
  Description of Artificial Sequence: Synthetic probe
ctaagacgtctcatgactccaccgt

SEQ ID NO: 270 - DNA, 25 bp, Artificial Sequence
  Description of Artificial Sequence: Synthetic probe
agttgaattcatgttttgtgctgct

SEQ ID NO: 271 - DNA, 25 bp, Artificial Sequence
  Description of Artificial Sequence: Synthetic probe
gtccaccactcacatcacgggttgt

SEQ ID NO: 272 - DNA, 25 bp, Artificial Sequence
  Description of Artificial Sequence: Synthetic probe
agtggggtttttctcccggactcac

SEQ ID NO: 273 - DNA, 25 bp, Artificial Sequence
  Description of Artificial Sequence: Synthetic probe
agttgtccaagttacagttcccaca

SEQ ID NO: 274 - DNA, 25 bp, Artificial Sequence
  Description of Artificial Sequence: Synthetic probe
ctttgaggagtatttagagtcgtcg

SEQ ID NO: 275 - DNA, 25 bp, Artificial Sequence
  Description of Artificial Sequence: Synthetic probe
tttaaagacaaggacgagctacgcc

SEQ ID NO: 276 - DNA, 25 bp, Artificial Sequence
  Description of Artificial Sequence: Synthetic probe
cacgctcaagctccggttgtggacc

SEQ ID NO: 277 - DNA, 25 bp, Artificial Sequence
  Description of Artificial Sequence: Synthetic probe
aagttcccgtcgtctgcactaccaa

SEQ ID NO: 278 - DNA, 25 bp, Artificial Sequence
  Description of Artificial Sequence: Synthetic probe
tgaggtcaaggatcccgcccacgtc

SEQ ID NO: 279 - DNA, 25 bp, Artificial Sequence
  Description of Artificial Sequence: Synthetic probe
aaaaagacaactaccctattctgga

SEQ ID NO: 280 - DNA, 25 bp, Artificial Sequence
  Description of Artificial Sequence: Synthetic probe
attatagtgtcattgtgtttgtccg

SEQ ID NO: 281 - DNA, 25 bp, Artificial Sequence
  Description of Artificial Sequence: Synthetic probe
gtacccgtaggtcggtacttacacc

SEQ ID NO: 282 - skipped

SEQ ID NO: 283 - DNA, 25 bp, Artificial Sequence
  Description of Artificial Sequence: Synthetic probe
ccgacgtggtcggacggacgactca

SEQ ID NO: 284 - DNA, 25 bp, Artificial Sequence
  Description of Artificial Sequence: Synthetic probe
gtcatcacttgatactaccatggtc

SEQ ID NO: 285 - skipped

SEQ ID NO: 286 - DNA, 25 bp, Artificial Sequence
  Description of Artificial Sequence: Synthetic probe
gttccggtaagatagtgaacggaga

SEQ ID NO: 287 - DNA, 25 bp, Artificial Sequence
  Description of Artificial Sequence: Synthetic probe
taattggtgtaaagtacgtagaggt

SEQ ID NO: 288 - DNA, 25 bp, Artificial Sequence
  Description of Artificial Sequence: Synthetic probe
atctggtcactggaaacgacacggg

SEQ ID NO: 289 - DNA, 25 bp, Artificial Sequence
  Description of Artificial Sequence: Synthetic probe
atttgtccaagcaagaaccgcggtg

SEQ ID NO: 290 - DNA, 25 bp, Artificial Sequence
  Description of Artificial Sequence: Synthetic probe
atggaactaagtattccttcggggt

SEQ ID NO: 291 - DNA, 25 bp, Artificial Sequence
  Description of Artificial Sequence: Synthetic probe
gatcctcccgagtaaggtctgtgtc

SEQ ID NO: 292 - DNA, 25 bp, Artificial Sequence
  Description of Artificial Sequence: Synthetic probe
ctagtaacgtctgtcccggaggtat

SEQ ID NO: 293 - DNA, 25 bp, Artificial Sequence
  Description of Artificial Sequence: Synthetic probe
cgaacaggacactggtgccctctct

SEQ ID NO: 294 - DNA, 25 bp, Artificial Sequence
  Description of Artificial Sequence: Synthetic probe
ctatcttcgacggttccagacccga

SEQ ID NO: 295 - DNA, 25 bp, Artificial Sequence
  Description of Artificial Sequence: Synthetic probe
ccttacgtcgacgagtagacaaccc

SEQ ID NO: 296 - DNA, 25 bp, Artificial Sequence
  Description of Artificial Sequence: Synthetic probe
cttcacaccaggagctgaggttccg

SEQ ID NO: 297 - DNA, 25 bp, Artificial Sequence
  Description of Artificial Sequence: Synthetic probe
acgcatttcggtttgctgccgtcgt

SEQ ID NO: 298 - DNA, 25 bp, Artificial Sequence
  Description of Artificial Sequence: Synthetic probe
cttcaaacagtatccttcccgtcgg

SEQ ID NO: 299 - DNA, 25 bp, Artificial Sequence
  Description of Artificial Sequence: Synthetic probe
tcccgacctggtagttccgaaatca

SEQ ID NO: 300 - skipped

SEQ ID NO: 301 - DNA, 25 bp, Artificial Sequence
  Description of Artificial Sequence: Synthetic probe
tttcgtgagagtgggtccatcgttc

SEQ ID NO: 302 - DNA, 25 bp, Artificial Sequence
  Description of Artificial Sequence: Synthetic probe
tccaggggtttaggacttttacgtg

SEQ ID NO: 303 - DNA, 25 bp, Artificial Sequence
  Description of Artificial Sequence: Synthetic probe
gcctcgtcgtcactaaggtcgaagt

SEQ ID NO: 304 - DNA, 25 bp, Artificial Sequence
  Description of Artificial Sequence: Synthetic probe
gcgttagctgctccacttagtgaca

SEQ ID NO: 305 - DNA, 25 bp, Artificial Sequence
  Description of Artificial Sequence: Synthetic probe
aatttacgtttatctggtgagtgtt

SEQ ID NO: 306 - DNA, 25 bp, Artificial Sequence
  Description of Artificial Sequence: Synthetic probe
gacgtccattttgcggcgcggaccc

SEQ ID NO: 307 - skipped

SEQ ID NO: 308 - DNA, 25 bp, Artificial Sequence
  Description of Artificial Sequence: Synthetic probe
agtttccgtcctttccgactccgga

SEQ ID NO: 309 - DNA, 25 bp, Artificial Sequence
  Description of Artificial Sequence: Synthetic probe
cccgtgaaatagacggactagtcta

SEQ ID NO: 310 - DNA, 25 bp, Artificial Sequence
  Description of Artificial Sequence: Synthetic probe
atacggattttaatagtttcagggg

SEQ ID NO: 311 - skipped

SEQ ID NO: 312 - DNA, 25 bp, Artificial Sequence
  Description of Artificial Sequence: Synthetic probe
cgaattaccttaccttgtgacgagg

SEQ ID NO: 313 - DNA, 25 bp, Artificial Sequence
  Description of Artificial Sequence: Synthetic probe
attttacgttttgggtccaacccgt

SEQ ID NO: 314 - DNA, 25 bp, Artificial Sequence
  Description of Artificial Sequence: Synthetic probe
agatcagcttcttcggtgaaccagg

SEQ ID NO: 315 - DNA, 25 bp, Artificial Sequence
  Description of Artificial Sequence: Synthetic probe
gtaagaaaacgagtacgcctaccct

SEQ ID NO: 316 - DNA, 25 bp, Artificial Sequence
  Description of Artificial Sequence: Synthetic probe
tccctctagtaaagtgatgacctac

SEQ ID NO: 317 - DNA, 25 bp, Artificial Sequence
  Description of Artificial Sequence: Synthetic probe
tccggtatccagtatcgactcttca

SEQ ID NO: 318 - DNA, 25 bp, Artificial Sequence
  Description of Artificial Sequence: Synthetic probe
aacaggactgttcgaccaccctcga

SEQ ID NO: 319 - DNA, 25 bp, Artificial Sequence
  Description of Artificial Sequence: Synthetic probe
gtttcagtcgtagtaataccaggct

SEQ ID NO: 320 - DNA, 25 bp, Artificial Sequence
  Description of Artificial Sequence: Synthetic probe
ttcacaccaggagctgaggttccgt

SEQ ID NO: 321 - DNA, 25 bp, Artificial Sequence
  Description of Artificial Sequence: Synthetic probe
attaagtttcttgagccgtgtcgtg

SEQ ID NO: 322 - DNA, 25 bp, Artificial Sequence
  Description of Artificial Sequence: Synthetic probe
gtaactccagatgatacatgatcag

SEQ ID NO: 323 - DNA, 25 bp, Artificial Sequence
  Description of Artificial Sequence: Synthetic probe
cggtctgggctacctcgctcgtggc

SEQ ID NO: 324 - DNA, 25 bp, Artificial Sequence
  Description of Artificial Sequence: Synthetic probe
agttttatctgtgtcccttccggta

SEQ ID NO: 325 - DNA, 25 bp, Artificial Sequence
  Description of Artificial Sequence: Synthetic probe
gtgtgaaaactcatcactcccggac

SEQ ID NO: 326 - DNA, 25 bp, Artificial Sequence
  Description of Artificial Sequence: Synthetic probe
aaagtggtcgaagcgtgtctgaaag

SEQ ID NO: 327 - DNA, 25 bp, Artificial Sequence
  Description of Artificial Sequence: Synthetic probe
gtcaaagaacaagggtaggcatacc

SEQ ID NO: 328 - DNA, 25 bp, Artificial Sequence
  Description of Artificial Sequence: Synthetic probe
tggtgttgtagatcgtctcttagtg

SEQ ID NO: 329 - DNA, 25 bp, Artificial Sequence
  Description of Artificial Sequence: Synthetic probe
agtcggccggacacatgtgcttcag

SEQ ID NO: 330 - DNA, 25 bp, Artificial Sequence
  Description of Artificial Sequence: Synthetic probe
agttctgatgtccagggtcgttcgt

SEQ ID NO: 331 - DNA, 25 bp, Artificial Sequence
  Description of Artificial Sequence: Synthetic probe
gacaacattagtcaacatttgtggt

SEQ ID NO: 332 - DNA, 25 bp, Artificial Sequence
  Description of Artificial Sequence: Synthetic probe
attccctgtcaaaagaaagtcacct

SEQ ID NO: 333 - DNA, 25 bp, Artificial Sequence
  Description of Artificial Sequence: Synthetic probe
agtcgagactttcaggccaaggttt

SEQ ID NO: 334 - DNA, 25 bp, Artificial Sequence
  Description of Artificial Sequence: Synthetic probe
gtttcatcaaacttcacaccggacg

SEQ ID NO: 335 - DNA, 25 bp, Artificial Sequence
  Description of Artificial Sequence: Synthetic probe
accggtgtcaagaaatggtgtctaa

SEQ ID NO: 336 - DNA, 25 bp, Artificial Sequence
  Description of Artificial Sequence: Synthetic probe
ctcatcatttattcggagtcgggga

SEQ ID NO: 337 - DNA, 25 bp, Artificial Sequence
  Description of Artificial Sequence: Synthetic probe
cactgcggatgttggtctattattt

SEQ ID NO: 338 - DNA, 25 bp, Artificial Sequence
  Description of Artificial Sequence: Synthetic probe
acacgtttagacatggtggttccac

SEQ ID NO: 339 - DNA, 25 bp, Artificial Sequence
  Description of Artificial Sequence: Synthetic probe
ccagtcttaggggtagtagtgtttt

SEQ ID NO: 340 - DNA, 25 bp, Artificial Sequence
  Description of Artificial Sequence: Synthetic probe
gtttccacgcgaacattgcgaggtg

SEQ ID NO: 341 - DNA, 25 bp, Artificial Sequence
  Description of Artificial Sequence: Synthetic probe
gatttcgttacccttgtcatcttca

SEQ ID NO: 342 - DNA, 25 bp, Artificial Sequence
  Description of Artificial Sequence: Synthetic probe
agtcttagggaactcgaccgattca

SEQ ID NO: 343 - DNA, 25 bp, Artificial Sequence
  Description of Artificial Sequence: Synthetic probe
agaggatctgtcactgtgtctttca

SEQ ID NO: 344 - DNA, 25 bp, Artificial Sequence
  Description of Artificial Sequence: Synthetic probe
catcaagtcggtcggtcagtgtaac

SEQ ID NO: 345 - DNA, 25 bp, Artificial Sequence
  Description of Artificial Sequence: Synthetic probe
aggaggactcaaccggagattttgg

SEQ ID NO: 346 - DNA, 25 bp, Artificial Sequence
  Description of Artificial Sequence: Synthetic probe
gtttccctacttcccaggcgagagt

SEQ ID NO: 347 - DNA, 25 bp, Artificial Sequence
  Description of Artificial Sequence: Synthetic probe
actccccttttgatgacctcgagga

SEQ ID NO: 348 - DNA, 25 bp, Artificial Sequence
  Description of Artificial Sequence: Synthetic probe
tcttttattaatgtcgcccgcgccc

SEQ ID NO: 349 - DNA, 25 bp, Artificial Sequence
  Description of Artificial Sequence: Synthetic probe
gaccaaaagagggtagatttatgat

SEQ ID NO: 350 - DNA, 25 bp, Artificial Sequence
  Description of Artificial Sequence: Synthetic probe
ttatcgttgcgacggaaggccttct

SEQ ID NO: 351 - skipped

SEQ ID NO: 352 - DNA, 25 bp, Artificial Sequence
  Description of Artificial Sequence: Synthetic probe
actaaccgagtgaggcgtctggcac

SEQ ID NO: 353 - DNA, 25 bp, Artificial Sequence
  Description of Artificial Sequence: Synthetic probe
agttcaagcgacttctgtcacggtg

SEQ ID NO: 354 - DNA, 25 bp, Artificial Sequence
  Description of Artificial Sequence: Synthetic probe
agaacgtcatgtttggtccgtctgg

SEQ ID NO: 355 - DNA, 25 bp, Artificial Sequence
  Description of Artificial Sequence: Synthetic probe
attgttacagtacgtggtcccacta

SEQ ID NO: 356 - DNA, 25 bp, Artificial Sequence
  Description of Artificial Sequence: Synthetic probe
ataaagaaggtgtcgggagctgatt

SEQ ID NO: 357 - DNA, 25 bp, Artificial Sequence
  Description of Artificial Sequence: Synthetic probe
ccaagtagtcgacgtgaagggcatc

SEQ ID NO: 358 - DNA, 25 bp, Artificial Sequence
  Description of Artificial Sequence: Synthetic probe
agtatctcgagtacctgtgggacct

SEQ ID NO: 359 - DNA, 25 bp, Artificial Sequence
  Description of Artificial Sequence: Synthetic probe
ggttttgcaaagtgtgtttagtcca

SEQ ID NO: 360 - DNA, 25 bp, Artificial Sequence
  Description of Artificial Sequence: Synthetic probe
gccgtcgcggaaccctgttttttgt

SEQ ID NO: 361 - DNA, 25 bp, Artificial Sequence
  Description of Artificial Sequence: Synthetic probe
atcctgaggagacaacaatccggta

SEQ ID NO: 362 - DNA, 25 bp, Artificial Sequence
  Description of Artificial Sequence: Synthetic probe
ccgtggacggtctttatgaagcttc

SEQ ID NO: 363 - DNA, 25 bp, Artificial Sequence
  Description of Artificial Sequence: Synthetic probe
ctttggcttaatccttctccggtac

SEQ ID NO: 364 - DNA, 25 bp, Artificial Sequence
  Description of Artificial Sequence: Synthetic probe
acatactccctaggttctctgtagt

SEQ ID NO: 365 - DNA, 25 bp, Artificial Sequence
  Description of Artificial Sequence: Synthetic probe
cgaccgtagtaaaataccacccgga

SEQ ID NO: 366 - DNA, 25 bp, Artificial Sequence
  Description of Artificial Sequence: Synthetic probe
gttagtggttaccattcaccgtcga

SEQ ID NO: 367 - DNA, 25 bp, Artificial Sequence
  Description of Artificial Sequence: Synthetic probe
agatgaaccttcagtcccaagagtt

SEQ ID NO: 368 - DNA, 25 bp, Artificial Sequence
  Description of Artificial Sequence: Synthetic probe
ttagttctaaaacatgtgagtagta

SEQ ID NO: 369 - DNA, 25 bp, Artificial Sequence
  Description of Artificial Sequence: Synthetic probe
ggccgaccctggtgcagaagtccct

SEQ ID NO: 370 - DNA, 25 bp, Artificial Sequence
  Description of Artificial Sequence: Synthetic probe
agctgcaggtcgtgttaccgaagtc

SEQ ID NO: 371 - DNA, 25 bp, Artificial Sequence
  Description of Artificial Sequence: Synthetic probe
tcctacgagaggcacgactcaggcg

SEQ ID NO: 372 - skipped

SEQ ID NO: 373 - DNA, 25 bp, Artificial Sequence
  Description of Artificial Sequence: Synthetic probe
tctgaaaccagcgaaatgtcacagt

SEQ ID NO: 374 - DNA, 25 bp, Artificial Sequence
  Description of Artificial Sequence: Synthetic probe
atagcggttcttgttgttccagggt

SEQ ID NO: 375 - DNA, 25 bp, Artificial Sequence
  Description of Artificial Sequence: Synthetic probe
ctaacttattagtttgtgtataggg

SEQ ID NO: 376 - DNA, 25 bp, Artificial Sequence
  Description of Artificial Sequence: Synthetic probe
agacagaggtaacgatggtaggatc

SEQ ID NO: 377 - DNA, 25 bp, Artificial Sequence
  Description of Artificial Sequence: Synthetic probe
aaaggtttagatcgaggttgttgga

SEQ ID NO: 378 - DNA, 25 bp, Artificial Sequence
  Description of Artificial Sequence: Synthetic probe
gagacccgatatcgtgtgtcccggt

SEQ ID NO: 379 - DNA, 25 bp, Artificial Sequence
  Description of Artificial Sequence: Synthetic probe
aattctgattaatatttcaatgtcg

SEQ ID NO: 380 - DNA, 25 bp, Artificial Sequence
  Description of Artificial Sequence: Synthetic probe
agtacttgaggtaagtttgtatacg

SEQ ID NO: 381 - DNA, 25 bp, Artificial Sequence
  Description of Artificial Sequence: Synthetic probe
cctcgactccagacagttttgtgct

SEQ ID NO: 382 - DNA, 25 bp, Artificial Sequence
  Description of Artificial Sequence: Synthetic probe
cgaattgcgaatacctctccgtcta

SEQ ID NO: 383 - DNA, 25 bp, Artificial Sequence
  Description of Artificial Sequence: Synthetic probe
gcgatcggcggcgttgtttcaaact

SEQ ID NO: 384 - DNA, 25 bp, Artificial Sequence
  Description of Artificial Sequence: Synthetic probe
accctctcttaaagctccgaaacgt

SEQ ID NO: 385 - DNA, 25 bp, Artificial Sequence
  Description of Artificial Sequence: Synthetic probe
acgtggtccacctacagcatgacac

SEQ ID NO: 386 - skipped

SEQ ID NO: 387 - DNA, 25 bp, Artificial Sequence
  Description of Artificial Sequence: Synthetic probe
cgaatcttcaaggtaattcggtatt

SEQ ID NO: 388 - DNA, 25 bp, Artificial Sequence
  Description of Artificial Sequence: Synthetic probe
tcgagacgaggaactcctacccggc

SEQ ID NO: 389 - DNA, 25 bp, Artificial Sequence
  Description of Artificial Sequence: Synthetic probe
cttccacacgagaccaaatgatggt

SEQ ID NO: 390 - DNA, 25 bp, Artificial Sequence
  Description of Artificial Sequence: Synthetic probe
ccttcgaggtctcgaggcgcaggct

SEQ ID NO: 391 - DNA, 25 bp, Artificial Sequence
  Description of Artificial Sequence: Synthetic probe
aaattaagagtagtaaggagtcagg

SEQ ID NO: 392 - DNA, 25 bp, Artificial Sequence
  Description of Artificial Sequence: Synthetic probe
gttgtttggatacgaccctcggact

SEQ ID NO: 393 - DNA, 25 bp, Artificial Sequence
  Description of Artificial Sequence: Synthetic probe
cttgtttacagagaggagtttaccc

SEQ ID NO: 394 - DNA, 25 bp, Artificial Sequence
  Description of Artificial Sequence: Synthetic probe
cagtgatagttagtccgtggacgac

SEQ ID NO: 395 - DNA, 25 bp, Artificial Sequence
  Description of Artificial Sequence: Synthetic probe
ccaaaaggcgacactcctagacggg

SEQ ID NO: 396 - DNA, 25 bp, Artificial Sequence
  Description of Artificial Sequence: Synthetic probe
aataatcggtacagggtagagacca

SEQ ID NO: 397 - DNA, 25 bp, Artificial Sequence
  Description of Artificial Sequence: Synthetic probe
agttccggtggtacgacaaagagtc

SEQ ID NO: 398 - DNA, 25 bp, Artificial Sequence
  Description of Artificial Sequence: Synthetic probe
cctccaactcggtcgtaacacagtg

SEQ ID NO: 399 - skipped

SEQ ID NO: 400 - DNA, 25 bp, Artificial Sequence
  Description of Artificial Sequence: Synthetic probe
gtctgcctcgcgaaaggccctctgt

SEQ ID NO: 401 - DNA, 25 bp, Artificial Sequence
  Description of Artificial Sequence: Synthetic probe
aggaatagtgacgatgttcccatcc

SEQ ID NO: 402 - DNA, 25 bp, Artificial Sequence
  Description of Artificial Sequence: Synthetic probe
caccagaaacgcgtcccgggtacga

SEQ ID NO: 403 - DNA, 25 bp, Artificial Sequence
  Description of Artificial Sequence: Synthetic probe
cgtggtttgattatcctacgtttga

SEQ ID NO: 404 - DNA, 25 bp, Artificial Sequence
  Description of Artificial Sequence: Synthetic probe
ctttcttagactactcgaagtgatc

SEQ ID NO: 405 - DNA, 25 bp, Artificial Sequence
  Description of Artificial Sequence: Synthetic probe
ctgctcgtgaatatagtctgttgtc

SEQ ID NO: 406 - DNA, 25 bp, Artificial Sequence
  Description of Artificial Sequence: Synthetic probe
gttctagttactaccatcgggacct

SEQ ID NO: 407 - DNA, 25 bp, Artificial Sequence
  Description of Artificial Sequence: Synthetic probe
attctttaggtcagtcatttgtcgg

SEQ ID NO: 408 - DNA, 25 bp, Artificial Sequence
  Description of Artificial Sequence: Synthetic probe
atttaaggtgacgactggagaccct

SEQ ID NO: 409 - skipped

SEQ ID NO: 410 - DNA, 25 bp, Artificial Sequence
  Description of Artificial Sequence: Synthetic probe
acgttagtactatctactacttctc

SEQ ID NO: 411 - DNA, 25 bp, Artificial Sequence
  Description of Artificial Sequence: Synthetic probe
agggtgcaaccacgtccagtatgtc

SEQ ID NO: 412 - DNA, 25 bp, Artificial Sequence
  Description of Artificial Sequence: Synthetic probe
ctttgacgatgaagacgcaatgcgc

SEQ ID NO: 413 - skipped

SEQ ID NO: 414 - DNA, 25 bp, Artificial Sequence
  Description of Artificial Sequence: Synthetic probe
ggtatttgaccacgcaggagcccaa

SEQ ID NO: 415 - DNA, 25 bp, Artificial Sequence
  Description of Artificial Sequence: Synthetic probe
gattgggtcaagtcctagttcttcc

SEQ ID NO: 416 - DNA, 25 bp, Artificial Sequence
  Description of Artificial Sequence: Synthetic probe
ggaatctattcactgtcgtgtgagg

SEQ ID NO: 417 - DNA, 25 bp, Artificial Sequence
  Description of Artificial Sequence: Synthetic probe
gttgtctcaaaggtttaagggtaag

SEQ ID NO: 418 - DNA, 25 bp, Artificial Sequence
  Description of Artificial Sequence: Synthetic probe
gttactttccactagagacgccgag

SEQ ID NO: 419 - DNA, 25 bp, Artificial Sequence
  Description of Artificial Sequence: Synthetic probe
actcatgtcacatagtgagaaccag

SEQ ID NO: 420 - DNA, 25 bp, Artificial Sequence
  Description of Artificial Sequence: Synthetic probe
aggacctgaaatcaccgtttgagtc

SEQ ID NO: 421 - DNA, 25 bp, Artificial Sequence
  Description of Artificial Sequence: Synthetic probe
gagcatagtgacactctgatgttcg

SEQ ID NO: 422 - DNA, 25 bp, Artificial Sequence
  Description of Artificial Sequence: Synthetic probe
agaaagtcgggttaggtgattcctc

SEQ ID NO: 423 - DNA, 25 bp, Artificial Sequence
  Description of Artificial Sequence: Synthetic probe
agtcttgtaggggtgtattagttac

SEQ ID NO: 424 - DNA, 25 bp, Artificial Sequence
  Description of Artificial Sequence: Synthetic probe
aatgaaaaggtgagtagtcggccgc

SEQ ID NO: 425 - DNA, 25 bp, Artificial Sequence
  Description of Artificial Sequence: Synthetic probe
agtaaagttacgactcaggtgaccg

SEQ ID NO: 426 - DNA, 25 bp, Artificial Sequence
  Description of Artificial Sequence: Synthetic probe
ctaattccccccgtgccgtctacat

SEQ ID NO: 427 - DNA, 25 bp, Artificial Sequence
  Description of Artificial Sequence: Synthetic probe
ctcgggcgaccgacacgattgttac

SEQ ID NO: 428 - DNA, 25 bp, Artificial Sequence
  Description of Artificial Sequence: Synthetic probe
cgattcctctagtgtcgttctaatt

SEQ ID NO: 429 - DNA, 25 bp, Artificial Sequence
  Description of Artificial Sequence: Synthetic probe
atgtgagctagtttttcacggcctg

SEQ ID NO: 430 - DNA, 25 bp, Artificial Sequence
  Description of Artificial Sequence: Synthetic probe
cccggaaagactgtgagggaacgtc

SEQ ID NO: 431 - DNA, 25 bp, Artificial Sequence
  Description of Artificial Sequence: Synthetic probe
gtttcggtagtaagggtatcggcat

SEQ ID NO: 432 - DNA, 25 bp, Artificial Sequence
  Description of Artificial Sequence: Synthetic probe
cttgcccgtcctctcgggacagggg

SEQ ID NO: 433 - DNA, 25 bp, Artificial Sequence
  Description of Artificial Sequence: Synthetic probe
atcatattttgtgtcctcggtgaac

SEQ ID NO: 434 - DNA, 25 bp, Artificial Sequence
  Description of Artificial Sequence: Synthetic probe
gtggtctgacactctagttacggtt

SEQ ID NO: 435 - DNA, 25 bp, Artificial Sequence
  Description of Artificial Sequence: Synthetic probe
ggttctgatgtcgaaagaggtctac

SEQ ID NO: 436 - DNA, 25 bp, Artificial Sequence
  Description of Artificial Sequence: Synthetic probe
agacggccgcggacaacttctcgac

SEQ ID NO: 437 - DNA, 25 bp, Artificial Sequence
  Description of Artificial Sequence: Synthetic probe
attctccctctatgattttctctga

SEQ ID NO: 438 - DNA, 25 bp, Artificial Sequence
  Description of Artificial Sequence: Synthetic probe
cttacctgacttttcctgttgtggg

SEQ ID NO: 439 - DNA, 25 bp, Artificial Sequence
  Description of Artificial Sequence: Synthetic probe
ccgttgatcgaggacttcgtattgc

SEQ ID NO: 440 - DNA, 25 bp, Artificial Sequence
  Description of Artificial Sequence: Synthetic probe
gttatgttttggacgacgtatccag

SEQ ID NO: 441 - DNA, 25 bp, Artificial Sequence
  Description of Artificial Sequence: Synthetic probe
ctacatgttttgtgaggagccttcg

SEQ ID NO: 442 - DNA, 25 bp, Artificial Sequence
  Description of Artificial Sequence: Synthetic probe
aagtagggacccgttcctctccagc

SEQ ID NO: 443 - DNA, 25 bp, Artificial Sequence
  Description of Artificial Sequence: Synthetic probe
acagagtccatgtcttcaaattacg

SEQ ID NO: 444 - DNA, 25 bp, Artificial Sequence
  Description of Artificial Sequence: Synthetic probe
tgtaggagccatagcaggtggtccc

SEQ ID NO: 445 - DNA, 25 bp, Artificial Sequence
  Description of Artificial Sequence: Synthetic probe
gtggttggattatttatccggttta

SEQ ID NO: 446 - DNA, 25 bp, Artificial Sequence
  Description of Artificial Sequence: Synthetic probe
ctattcggagtaggagccttttggt

SEQ ID NO: 447 - DNA, 25 bp, Artificial Sequence
  Description of Artificial Sequence: Synthetic probe
gtagttgataagaacaccgtcggtc

SEQ ID NO: 448 - DNA, 25 bp, Artificial Sequence
  Description of Artificial Sequence: Synthetic probe
actggtgtacgaccctagacccgac

SEQ ID NO: 449 - DNA, 25 bp, Artificial Sequence
  Description of Artificial Sequence: Synthetic probe
tctttatacagttaagctttaaaaa

SEQ ID NO: 450 - skipped

SEQ ID NO: 451 - DNA, 25 bp, Artificial Sequence
  Description of Artificial Sequence: Synthetic probe
gactcttcacaccaggagctgaggt

SEQ ID NO: 452 - DNA, 25 bp, Artificial Sequence
  Description of Artificial Sequence: Synthetic probe
ttccagtgttcgtcgaccggctcta

SEQ ID NO: 453 - DNA, 25 bp, Artificial Sequence
  Description of Artificial Sequence: Synthetic probe
gaacccagcggaccagacacttcgg

SEQ ID NO: 454 - DNA, 25 bp, Artificial Sequence
  Description of Artificial Sequence: Synthetic probe
atttaattaccacgagacgaccctg

SEQ ID NO: 455 - DNA, 25 bp, Artificial Sequence
  Description of Artificial Sequence: Synthetic probe
cccatgggtgtatgtatgttccgta

SEQ ID NO: 456 - DNA, 25 bp, Artificial Sequence
  Description of Artificial Sequence: Synthetic probe
agcgtgggcattgcgcagccccgga

SEQ ID NO: 457 - DNA, 25 bp, Artificial Sequence
  Description of Artificial Sequence: Synthetic probe
gtgtgacactctcttctggaccacc

SEQ ID NO: 458 - DNA, 25 bp, Artificial Sequence
  Description of Artificial Sequence: Synthetic probe
agtcgaaaatccgatctttatcttc

SEQ ID NO: 459 - DNA, 25 bp, Artificial Sequence
  Description of Artificial Sequence: Synthetic probe
cttttacacgtaaggctcgattccc

SEQ ID NO: 460 - DNA, 25 bp, Artificial Sequence
  Description of Artificial Sequence: Synthetic probe
ggaaattcttcactaactaggtaag

SEQ ID NO: 461 - DNA, 25 bp, Artificial Sequence
  Description of Artificial Sequence: Synthetic probe
tcgagtgacacgtcagggtcgtcgt

SEQ ID NO: 462 - DNA, 25 bp, Artificial Sequence
  Description of Artificial Sequence: Synthetic probe
aaagcggacttactttttcctgagt

SEQ ID NO: 463 - DNA, 25 bp, Artificial Sequence
  Description of Artificial Sequence: Synthetic probe
gaatatctcagggtccgtggtaagg

SEQ ID NO: 464 - DNA, 25 bp, Artificial Sequence
  Description of Artificial Sequence: Synthetic probe
ggtggtagatcaaacctaacaagtt

SEQ ID NO: 465 - skipped

SEQ ID NO: 466 - DNA, 25 bp, Artificial Sequence
  Description of Artificial Sequence: Synthetic probe
ctaacctaccgtcttagacctagat

SEQ ID NO: 467 - DNA, 25 bp, Artificial Sequence
  Description of Artificial Sequence: Synthetic probe
acgccatgtcgtactttgggtggtc

SEQ ID NO: 468 - DNA, 25 bp, Artificial Sequence
  Description of Artificial Sequence: Synthetic probe
ggtcgggtccaacagtcgctactat

SEQ ID NO: 469 - DNA, 25 bp, Artificial Sequence
  Description of Artificial Sequence: Synthetic probe
gtttttctcaccactacttgtctcc

SEQ ID NO: 470 - DNA, 25 bp, Artificial Sequence
  Description of Artificial Sequence: Synthetic probe
gtcctaatccttttggcggtgtcga

SEQ ID NO: 471 - DNA, 25 bp, Artificial Sequence
  Description of Artificial Sequence: Synthetic probe
accgaccaacggtcgggtggatcca

SEQ ID NO: 472 - DNA, 25 bp, Artificial Sequence
  Description of Artificial Sequence: Synthetic probe
aggagtttgtctactttagcccgta

SEQ ID NO: 473 - DNA, 25 bp, Artificial Sequence
  Description of Artificial Sequence: Synthetic probe
acgactcatcggtcatcggactgcg

SEQ ID NO: 474 - DNA, 25 bp, Artificial Sequence
  Description of Artificial Sequence: Synthetic probe
ttggtaccctacagaatccttctcc

SEQ ID NO: 475 - DNA, 25 bp, Artificial Sequence
  Description of Artificial Sequence: Synthetic probe
tctccgtgtagagagggtcagaccc

SEQ ID NO: 476 - DNA, 25 bp, Artificial Sequence
  Description of Artificial Sequence: Synthetic probe
ggtacccgacctccagtttccagtg

SEQ ID NO: 477 - DNA, 25 bp, Artificial Sequence
  Description of Artificial Sequence: Synthetic probe
atgtagggtcatgtttacgtaggaa

SEQ ID NO: 478 - DNA, 25 bp, Artificial Sequence
  Description of Artificial Sequence: Synthetic probe
tctgtagaagaaggttccttggaac

SEQ ID NO: 479 - DNA, 25 bp, Artificial Sequence
  Description of Artificial Sequence: Synthetic probe
ccgttattgacgttataggaacaga

SEQ ID NO: 480 - DNA, 25 bp, Artificial Sequence
  Description of Artificial Sequence: Synthetic probe
ctaccatgcataaactggtttcgtc

SEQ ID NO: 481 - DNA, 25 bp, Artificial Sequence
  Description of Artificial Sequence: Synthetic probe
atttctaccttagcattttgagtta

SEQ ID NO: 482 - DNA, 25 bp, Artificial Sequence
  Description of Artificial Sequence: Synthetic probe
ctcaggtcaatgttccaccttgatc

SEQ ID NO: 483 - DNA, 25 bp, Artificial Sequence
  Description of Artificial Sequence: Synthetic probe
ctccatatacaacgtcctaggtcct

SEQ ID NO: 484 - DNA, 25 bp, Artificial Sequence
  Description of Artificial Sequence: Synthetic probe
tccgaccctgagttcacgccggggt

SEQ ID NO: 485 - DNA, 25 bp, Artificial Sequence
  Description of Artificial Sequence: Synthetic probe
tatactttatttcgggtgtcatttc

SEQ ID NO: 486 - DNA, 25 bp, Artificial Sequence
  Description of Artificial Sequence: Synthetic probe
aattttggtaggtgatttactgact

SEQ ID NO: 487 - DNA, 25 bp, Artificial Sequence
  Description of Artificial Sequence: Synthetic probe
attaggaaaccgtcacttttgggac

SEQ ID NO: 488 - DNA, 25 bp, Artificial Sequence
  Description of Artificial Sequence: Synthetic probe
aggtcgcaccgaaactcaacgtcgc

SEQ ID NO: 489 - DNA, 25 bp, Artificial Sequence
  Description of Artificial Sequence: Synthetic probe
ggtcacaccgacataactaccttcg

SEQ ID NO: 490 - DNA, 25 bp, Artificial Sequence
  Description of Artificial Sequence: Synthetic probe
cttcaccgacgtctgaggtatctcc

SEQ ID NO: 491 - DNA, 25 bp, Artificial Sequence
  Description of Artificial Sequence: Synthetic probe
aaggaagttgaacccaccagtccct

SEQ ID NO: 492 - DNA, 25 bp, Artificial Sequence
  Description of Artificial Sequence: Synthetic probe
gtccaggtcgaaatgagaagggttc

SEQ ID NO: 493 - DNA, 25 bp, Artificial Sequence
  Description of Artificial Sequence: Synthetic probe
ccacagacctaggttccagcggtgc

SEQ ID NO: 494 - DNA, 25 bp, Artificial Sequence
  Description of Artificial Sequence: Synthetic probe
gttattattcactgggtccctctga

SEQ ID NO: 495 - DNA, 25 bp, Artificial Sequence
  Description of Artificial Sequence: Synthetic probe
acggtaaagatgataggttcatgat

SEQ ID NO: 496 - DNA, 25 bp, Artificial Sequence
  Description of Artificial Sequence: Synthetic probe
attgttagggtttacacgtacgtgg

SEQ ID NO: 497 - DNA, 25 bp, Artificial Sequence
  Description of Artificial Sequence: Synthetic probe
aaaatgaagggtgcgcgtagaccgt

SEQ ID NO: 498 - DNA, 25 bp, Artificial Sequence
  Description of Artificial Sequence: Synthetic probe
accgagccactgagcgaccgatcca

SEQ ID NO: 499 - DNA, 25 bp, Artificial Sequence
  Description of Artificial Sequence: Synthetic probe
aagtccagcggtaccttagtcgtgt

SEQ ID NO: 500 - DNA, 25 bp, Artificial Sequence
  Description of Artificial Sequence: Synthetic probe
gaaaactacatctgtccatggagtc

SEQ ID NO: 501 - DNA, 25 bp, Artificial Sequence
  Description of Artificial Sequence: Synthetic probe
acatactctaagacttccgggacct

SEQ ID NO: 502 - DNA, 25 bp, Artificial Sequence
  Description of Artificial Sequence: Synthetic probe
gtcggaactagtctcctaggggcaa

SEQ ID NO: 503 - DNA, 25 bp, Artificial Sequence
  Description of Artificial Sequence: Synthetic probe
aatcgggtaaacttctcttcggtgt

SEQ ID NO: 504 - DNA, 25 bp, Artificial Sequence
  Description of Artificial Sequence: Synthetic probe
ctgacagacgtagcttccgggacta

SEQ ID NO: 505 - DNA, 25 bp, Artificial Sequence
  Description of Artificial Sequence: Synthetic probe
ctcttgtcgtgctgaagaggtaatg

SEQ ID NO: 506 - DNA, 25 bp, Artificial Sequence
  Description of Artificial Sequence: Synthetic probe
acaagatcttggtctggaattgact

SEQ ID NO: 507 - DNA, 25 bp, Artificial Sequence
  Description of Artificial Sequence: Synthetic probe
ccgctccacgtgaagcgccgcagtg

SEQ ID NO: 508 - skipped

SEQ ID NO: 509 - DNA, 25 bp, Artificial Sequence
  Description of Artificial Sequence: Synthetic probe
caaccactggttgtaagatctagaa

SEQ ID NO: 510 - DNA, 25 bp, Artificial Sequence
  Description of Artificial Sequence: Synthetic probe
acttcttagggacgagtgttcctta

SEQ ID NO: 511 - DNA, 25 bp, Artificial Sequence
  Description of Artificial Sequence: Synthetic probe
ctagacaggacccaagtcggttccc

SEQ ID NO: 512 - DNA, 25 bp, Artificial Sequence
  Description of Artificial Sequence: Synthetic probe
atttagtcggacagttcttccttcc

SEQ ID NO: 513 - DNA, 25 bp, Artificial Sequence
  Description of Artificial Sequence: Synthetic probe
gttctacagtacgtaactgaagaga

SEQ ID NO: 514 - DNA, 25 bp, Artificial Sequence
  Description of Artificial Sequence: Synthetic probe
tttttctactttgcgtagtacttaa

SEQ ID NO: 515 - DNA, 25 bp, Artificial Sequence
  Description of Artificial Sequence: Synthetic probe
ctcggagccgccgtttttggtcgcc

SEQ ID NO: 516 - DNA, 25 bp, Artificial Sequence
  Description of Artificial Sequence: Synthetic probe
ccgccccgccgcgcggttcccggcc

SEQ ID NO: 517 - DNA, 25 bp, Artificial Sequence
  Description of Artificial Sequence: Synthetic probe
ggatatgtttaaagcgacccgtccc

SEQ ID NO: 518 - DNA, 25 bp, Artificial Sequence
  Description of Artificial Sequence: Synthetic probe
gcaagacgacgtaacgaaaacgcgt

SEQ ID NO: 519 - DNA, 25 bp, Artificial Sequence
  Description of Artificial Sequence: Synthetic probe
tcaggtctagtggtgtcttggcctt

SEQ ID NO: 520 - skipped

SEQ ID NO: 521 - DNA, 25 bp, Artificial Sequence
  Description of Artificial Sequence: Synthetic probe
attaggagacggacagacacaagag

SEQ ID NO: 522 - DNA, 25 bp, Artificial Sequence
  Description of Artificial Sequence: Synthetic probe
cttctactgcagaagaaacgaccgc

SEQ ID NO: 523 - DNA, 25 bp, Artificial Sequence
  Description of Artificial Sequence: Synthetic probe
ccgtttggtcctacgaaccactggg

SEQ ID NO: 524 - DNA, 25 bp, Artificial Sequence
  Description of Artificial Sequence: Synthetic probe
ctgtaggagggtaatatatcagttc

SEQ ID NO: 525 - DNA, 25 bp, Artificial Sequence
  Description of Artificial Sequence: Synthetic probe
attaaggtcgtcttctgactagtgg

SEQ ID NO: 526 - DNA, 25 bp, Artificial Sequence
  Description of Artificial Sequence: Synthetic probe
cagagtggccacaagaaaaagagtc

SEQ ID NO: 527 - DNA, 25 bp, Artificial Sequence
  Description of Artificial Sequence: Synthetic probe
tccctcggcgtcacggaagcggagt

SEQ ID NO: 528 - DNA, 25 bp, Artificial Sequence
  Description of Artificial Sequence: Synthetic probe
ctttactttccaccctctcgttaga

SEQ ID NO: 529 - DNA, 25 bp, Artificial Sequence
  Description of Artificial Sequence: Synthetic probe
gacaacaagattcaattagccaaac

SEQ ID NO: 530 - DNA, 25 bp, Artificial Sequence
  Description of Artificial Sequence: Synthetic probe
atcggcactcagtagtcgtctgttg

SEQ ID NO: 531 - DNA, 25 bp, Artificial Sequence
  Description of Artificial Sequence: Synthetic probe
gaagctggaagtatccagacgacaa

SEQ ID NO: 532 - DNA, 25 bp, Artificial Sequence
  Description of Artificial Sequence: Synthetic probe
cttttcaagagaggaacgcgtcggt

SEQ ID NO: 533 - DNA, 25 bp, Artificial Sequence
  Description of Artificial Sequence: Synthetic probe
gtcacaacgcccgaactcgttctgg

SEQ ID NO: 534 - DNA, 25 bp, Artificial Sequence
  Description of Artificial Sequence: Synthetic probe
agacatccagtcgaactttagtagt

SEQ ID NO: 535 - DNA, 25 bp, Artificial Sequence
  Description of Artificial Sequence: Synthetic probe
tgtacagggtttgagtacgtctgta

SEQ ID NO: 536 - DNA, 25 bp, Artificial Sequence
  Description of Artificial Sequence: Synthetic probe
agactgggttcagctaggccactca

SEQ ID NO: 537 - DNA, 25 bp, Artificial Sequence
  Description of Artificial Sequence: Synthetic probe
ctacctacggaatgaattgggacga

SEQ ID NO: 538 - DNA, 25 bp, Artificial Sequence
  Description of Artificial Sequence: Synthetic probe
ctctcatctctttcttgtttcttta

SEQ ID NO: 539 - skipped

SEQ ID NO: 540 - DNA, 25 bp, Artificial Sequence
  Description of Artificial Sequence: Synthetic probe
cttcaatgttatgcgacaagggtag

SEQ ID NO: 541 - DNA, 25 bp, Artificial Sequence
  Description of Artificial Sequence: Synthetic probe
tgtccaaggctccttgtcggtcgtg

SEQ ID NO: 542 - DNA, 25 bp, Artificial Sequence
  Description of Artificial Sequence: Synthetic probe
aaagttatgttcctctgccagaccg

SEQ ID NO: 543 - DNA, 25 bp, Artificial Sequence
  Description of Artificial Sequence: Synthetic probe
ccataagtgaactacatagaggtcg

SEQ ID NO: 544 - DNA, 25 bp, Artificial Sequence
  Description of Artificial Sequence: Synthetic probe
agggaaacccggtccattaggatat

SEQ ID NO: 545 - DNA, 25 bp, Artificial Sequence
  Description of Artificial Sequence: Synthetic probe
ctcatgaactccatccacgcgggta

SEQ ID NO: 546 - DNA, 25 bp, Artificial Sequence
  Description of Artificial Sequence: Synthetic probe
ccagagtcaaggttcggaagtagaa

SEQ ID NO: 547 - DNA, 25 bp, Artificial Sequence
  Description of Artificial Sequence: Synthetic probe
ctccggtaatgatctatcagactaa

SEQ ID NO: 548 - DNA, 25 bp, Artificial Sequence
  Description of Artificial Sequence: Synthetic probe
atgcgactcataaaccggttcagcg

SEQ ID NO: 549 - DNA, 25 bp, Artificial Sequence
  Description of Artificial Sequence: Synthetic probe
aaaagtgttcccagtatttacggtc

SEQ ID NO: 550 - DNA, 25 bp, Artificial Sequence
  Description of Artificial Sequence: Synthetic probe
atacgacagtatggattatgtgata

SEQ ID NO: 551 - DNA, 25 bp, Artificial Sequence
  Description of Artificial Sequence: Synthetic probe
ggtgtggaacactacgtcttacggg

SEQ ID NO: 552 - DNA, 25 bp, Artificial Sequence
  Description of Artificial Sequence: Synthetic probe
ctaaaggaggttgcacggtgcaaga

SEQ ID NO: 553 - DNA, 25 bp, Artificial Sequence
  Description of Artificial Sequence: Synthetic probe
ctatcagttctatgaaaagtcggtg

SEQ ID NO: 554 - DNA, 25 bp, Artificial Sequence
  Description of Artificial Sequence: Synthetic probe
gtactggtctagaagttatactccc

SEQ ID NO: 555 - DNA, 25 bp, Artificial Sequence
  Description of Artificial Sequence: Synthetic probe
gacccattcttacattgaggaaacc

SEQ ID NO: 556 - skipped

SEQ ID NO: 557 - DNA, 25 bp, Artificial Sequence
  Description of Artificial Sequence: Synthetic probe
gaaaccctttttgtccataccgtaa

SEQ ID NO: 558 - DNA, 25 bp, Artificial Sequence
  Description of Artificial Sequence: Synthetic probe
atcccgttttaacttgacgcgtcgg

SEQ ID NO: 559 - DNA, 25 bp, Artificial Sequence
  Description of Artificial Sequence: Synthetic probe
ctcggtagcggtgatgtccactact

SEQ ID NO: 560 - DNA, 25 bp, Artificial Sequence
  Description of Artificial Sequence: Synthetic probe
accaaacttgttttgggtgacgtaa

SEQ ID NO: 561 - DNA, 25 bp, Artificial Sequence
  Description of Artificial Sequence: Synthetic probe
ctatcgacctggtccgccgtagacg

SEQ ID NO: 562 - DNA, 25 bp, Artificial Sequence
  Description of Artificial Sequence: Synthetic probe
aggttcccggagttaagagacgaaa

SEQ ID NO: 563 - DNA, 25 bp, Artificial Sequence
  Description of Artificial Sequence: Synthetic probe
tgaaatctttccctccctaacggtc

SEQ ID NO: 564 - DNA, 25 bp, Artificial Sequence
  Description of Artificial Sequence: Synthetic probe
cttcctcagatcttatacaagtcgt

SEQ ID NO: 565 - DNA, 25 bp, Artificial Sequence
  Description of Artificial Sequence: Synthetic probe
ctcggtaatgaagttctagtagctc

SEQ ID NO: 566 - DNA, 25 bp, Artificial Sequence
  Description of Artificial Sequence: Synthetic probe
aaactccctcagataacaatttgat

SEQ ID NO: 567 - DNA, 25 bp, Artificial Sequence
  Description of Artificial Sequence: Synthetic probe
gtcaatggttccatacttcagccag

SEQ ID NO: 568 - DNA, 25 bp, Artificial Sequence
  Description of Artificial Sequence: Synthetic probe
attagtcacatcagggtctggaccc

SEQ ID NO: 569 - DNA, 25 bp, Artificial Sequence
  Description of Artificial Sequence: Synthetic probe
ctagccacaccagtttaccgtgacg

SEQ ID NO: 570 - skipped

SEQ ID NO: 571 - DNA, 25 bp, Artificial Sequence
  Description of Artificial Sequence: Synthetic probe
agtcctactgcacgtctttttaccc

SEQ ID NO: 572 - DNA, 25 bp, Artificial Sequence
  Description of Artificial Sequence: Synthetic probe
cggtcttcaccatcgtatacgggta

SEQ ID NO: 573 - DNA, 25 bp, Artificial Sequence
  Description of Artificial Sequence: Synthetic probe
acgagttcgaaacgtaggtggtcga

SEQ ID NO: 574 - DNA, 25 bp, Artificial Sequence
  Description of Artificial Sequence: Synthetic probe
accttaagagacgtccggcgatcgt

SEQ ID NO: 575 - DNA, 25 bp, Artificial Sequence
  Description of Artificial Sequence: Synthetic probe
actaaaggtaggttggtctctagaa

SEQ ID NO: 576 - DNA, 25 bp, Artificial Sequence
  Description of Artificial Sequence: Synthetic probe
ccgtgactgtcaaagaagatctctg

SEQ ID NO: 577 - DNA, 25 bp, Artificial Sequence
  Description of Artificial Sequence: Synthetic probe
atctgggtcccgacgacaaacagcc

SEQ ID NO: 578 - DNA, 25 bp, Artificial Sequence
  Description of Artificial Sequence: Synthetic probe
aaatacagtacaagggtggagctcc

SEQ ID NO: 579 - DNA, 25 bp, Artificial Sequence
  Description of Artificial Sequence: Synthetic probe
gaggccgaggccctagtccgaaccg

SEQ ID NO: 580 - DNA, 25 bp, Artificial Sequence
  Description of Artificial Sequence: Synthetic probe
cccaaccggtgtcaagcggcgaagt

SEQ ID NO: 581 - DNA, 25 bp, Artificial Sequence
  Description of Artificial Sequence: Synthetic probe
gtttcatgtttagggttctcggaag

SEQ ID NO: 582 - DNA, 25 bp, Artificial Sequence
  Description of Artificial Sequence: Synthetic probe
agtctgaaagaagtccctaaaaata

SEQ ID NO: 583 - DNA, 25 bp, Artificial Sequence
  Description of Artificial Sequence: Synthetic probe
ataagtattcgtcaacccgtctggg

SEQ ID NO: 584 - DNA, 25 bp, Artificial Sequence
  Description of Artificial Sequence: Synthetic probe
ccaggtattacgaccacccgtttca

SEQ ID NO: 585 - DNA, 25 bp, Artificial Sequence
  Description of Artificial Sequence: Synthetic probe
cgcacgcagggctgcatagtctgag

SEQ ID NO: 586 - DNA, 25 bp, Artificial Sequence
  Description of Artificial Sequence: Synthetic probe
actcgggtagacatctctgtgtttg

SEQ ID NO: 587 - DNA, 25 bp, Artificial Sequence
  Description of Artificial Sequence: Synthetic probe
ctttggcggtgtaaaaagtccgact

SEQ ID NO: 588 - DNA, 25 bp, Artificial Sequence
  Description of Artificial Sequence: Synthetic probe
atccatttaattcgatcggtaagga

SEQ ID NO: 589 - DNA, 25 bp, Artificial Sequence
  Description of Artificial Sequence: Synthetic probe
ttcggcgtctggacgtgtcagtcag

SEQ ID NO: 590 - DNA, 25 bp, Artificial Sequence
  Description of Artificial Sequence: Synthetic probe
gtcttttaccatctctggttttctg

SEQ ID NO: 591 - DNA, 25 bp, Artificial Sequence
  Description of Artificial Sequence: Synthetic probe
agtgacgcgtgcatgaccactgggt

SEQ ID NO: 592 - DNA, 25 bp, Artificial Sequence
  Description of Artificial Sequence: Synthetic probe
cccttacaacgggagtaatgaccgt

SEQ ID NO: 593 - DNA, 25 bp, Artificial Sequence
  Description of Artificial Sequence: Synthetic probe
ttgtacggtgattcggactcagcac

SEQ ID NO: 594 - DNA, 25 bp, Artificial Sequence
  Description of Artificial Sequence: Synthetic probe
acaaacaagtgctgaaggtcggcca

SEQ ID NO: 595 - DNA, 25 bp, Artificial Sequence
  Description of Artificial Sequence: Synthetic probe
ctgtctaggtagtatagggccgttt

SEQ ID NO: 596 - DNA, 25 bp, Artificial Sequence
  Description of Artificial Sequence: Synthetic probe
caccacgtaccaggagtctttgagg

SEQ ID NO: 597 - DNA, 25 bp, Artificial Sequence
  Description of Artificial Sequence: Synthetic probe
cttcttaaggatcggttgttcgtga

SEQ ID NO: 598 - DNA, 25 bp, Artificial Sequence
  Description of Artificial Sequence: Synthetic probe
atgacattcaaaacggatttaaggt

SEQ ID NO: 599 - DNA, 25 bp, Artificial Sequence
  Description of Artificial Sequence: Synthetic probe
ctagtagagtcagggctacagtacc

SEQ ID NO: 600 - DNA, 25 bp, Artificial Sequence
  Description of Artificial Sequence: Synthetic probe
ccattaccttactccgactgaagga

SEQ ID NO: 601 - DNA, 25 bp, Artificial Sequence
  Description of Artificial Sequence: Synthetic probe
tgaagatgacgaacccagtgactgt

SEQ ID NO: 602 - skipped

SEQ ID NO: 603 - DNA, 25 bp, Artificial Sequence
  Description of Artificial Sequence: Synthetic probe
atgtgtattacctgatctgggacga

SEQ ID NO: 604 - DNA, 25 bp, Artificial Sequence
  Description of Artificial Sequence: Synthetic probe
ctcaaaaaacttgggtagactcggc

SEQ ID NO: 605 - DNA, 25 bp, Artificial Sequence
  Description of Artificial Sequence: Synthetic probe
tggaggagtcgtatcttttggtgtc

SEQ ID NO: 606 - DNA, 25 bp, Artificial Sequence
  Description of Artificial Sequence: Synthetic probe
cggtctattacttctacgctggctt

SEQ ID NO: 607 - DNA, 25 bp, Artificial Sequence
  Description of Artificial Sequence: Synthetic probe
gtgaaattcctcgtaccggtgtcgg

SEQ ID NO: 608 - DNA, 25 bp, Artificial Sequence
  Description of Artificial Sequence: Synthetic probe
cgacaccgtaaaggtttgtaggttt

SEQ ID NO: 609 - DNA, 25 bp, Artificial Sequence
  Description of Artificial Sequence: Synthetic probe
accgccgcgactacattgacgactg

SEQ ID NO: 610 - DNA, 25 bp, Artificial Sequence
  Description of Artificial Sequence: Synthetic probe
acataccgcagacgctcaataggag

SEQ ID NO: 611 - DNA, 25 bp, Artificial Sequence
  Description of Artificial Sequence: Synthetic probe
gtatactcttctacgacgctctggt

SEQ ID NO: 612 - DNA, 25 bp, Artificial Sequence
  Description of Artificial Sequence: Synthetic probe
ctctggtccaggacgagatcgccaa

SEQ ID NO: 613 - skipped

SEQ ID NO: 614 - DNA, 25 bp, Artificial Sequence
  Description of Artificial Sequence: Synthetic probe
agactaatctctgaaaccgtgcaca

SEQ ID NO: 615 - DNA, 25 bp, Artificial Sequence
  Description of Artificial Sequence: Synthetic probe
atacttaaccgactgctctgggtgg

SEQ ID NO: 616 - DNA, 25 bp, Artificial Sequence
  Description of Artificial Sequence: Synthetic probe
ctagtatttttccaagtctcccacc

SEQ ID NO: 617 - skipped

SEQ ID NO: 618 - DNA, 25 bp, Artificial Sequence
  Description of Artificial Sequence: Synthetic probe
cgacacacgttgcacgtctcagggt

SEQ ID NO: 619 - DNA, 25 bp, Artificial Sequence
  Description of Artificial Sequence: Synthetic probe
cgtggagacccgagtttcgccaaac

SEQ ID NO: 620 - skipped

SEQ ID NO: 621 - DNA, 25 bp, Artificial Sequence
  Description of Artificial Sequence: Synthetic probe
aggtcggccttcactgtttttctgt

SEQ ID NO: 622 - DNA, 25 bp, Artificial Sequence
  Description of Artificial Sequence: Synthetic probe
ttataaacattatgctatatcaatg

SEQ ID NO: 623 - DNA, 25 bp, Artificial Sequence
  Description of Artificial Sequence: Synthetic probe
ctatactactactgaaggggtgact

SEQ ID NO: 624 - DNA, 25 bp, Artificial Sequence
  Description of Artificial Sequence: Synthetic probe
atagacttctgtagtcgtgcctggt

SEQ ID NO: 625 - DNA, 25 bp, Artificial Sequence
  Description of Artificial Sequence: Synthetic probe
cgcgccgagacctgaccatttacta

SEQ ID NO: 626 - DNA, 25 bp, Artificial Sequence
  Description of Artificial Sequence: Synthetic probe
cctagaggcatctatgcgcggtggg

SEQ ID NO: 627 - DNA, 25 bp, Artificial Sequence
  Description of Artificial Sequence: Synthetic probe
acgtcggactcactctcgtactctg

SEQ ID NO: 628 - DNA, 25 bp, Artificial Sequence
  Description of Artificial Sequence: Synthetic probe
actcttcacaccaggagctgaggtt

SEQ ID NO: 629 - DNA, 25 bp, Artificial Sequence
  Description of Artificial Sequence: Synthetic probe
ggacctttatggtctggtacagaat

SEQ ID NO: 630 - DNA, 25 bp, Artificial Sequence
  Description of Artificial Sequence: Synthetic probe
tttacacacctgtttttgggtaccg

SEQ ID NO: 631 - DNA, 25 bp, Artificial Sequence
  Description of Artificial Sequence: Synthetic probe
accctcttaaagaaaaagtaggcct

SEQ ID NO: 632 - DNA, 25 bp, Artificial Sequence
  Description of Artificial Sequence: Synthetic probe
ctaggagtccttagcactgtcctgt

SEQ ID NO: 633 - DNA, 25 bp, Artificial Sequence
  Description of Artificial Sequence: Synthetic probe
cattcattctgcatccgtagaggta

SEQ ID NO: 634 - DNA, 25 bp, Artificial Sequence
  Description of Artificial Sequence: Synthetic probe
tgtatattgtggtaggtgtgattgt

SEQ ID NO: 635 - DNA, 25 bp, Artificial Sequence
  Description of Artificial Sequence: Synthetic probe
agaagggacctttggagttacgccg

SEQ ID NO: 636 - DNA, 25 bp, Artificial Sequence
  Description of Artificial Sequence: Synthetic probe
cttctaaacggtctgcgagtattac

SEQ ID NO: 637 - skipped

SEQ ID NO: 638 - DNA, 25 bp, Artificial Sequence
  Description of Artificial Sequence: Synthetic probe
gacaagagctacgagtcccgcgcca

SEQ ID NO: 639 - DNA, 25 bp, Artificial Sequence
  Description of Artificial Sequence: Synthetic probe
gttctgaagttaggacttgttgtcg

SEQ ID NO: 640 - DNA, 25 bp, Artificial Sequence
  Description of Artificial Sequence: Synthetic probe
agtcggtacgacatccttcttaggg

SEQ ID NO: 641 - DNA, 25 bp, Artificial Sequence
  Description of Artificial Sequence: Synthetic probe
atcattgggagtgtcgagcaaccac

SEQ ID NO: 642 - DNA, 25 bp, Artificial Sequence
  Description of Artificial Sequence: Synthetic probe
cggcctccctggaagacgactcggt

SEQ ID NO: 643 - DNA, 25 bp, Artificial Sequence
  Description of Artificial Sequence: Synthetic probe
atacttccagtcaagtcagggtggt

SEQ ID NO: 644 - DNA, 25 bp, Artificial Sequence
  Description of Artificial Sequence: Synthetic probe
gacaccctgctcgactttctgaaca

SEQ ID NO: 645 - DNA, 25 bp, Artificial Sequence
  Description of Artificial Sequence: Synthetic probe
cgggacgagtggcgtccggtggtgg

SEQ ID NO: 646 - DNA, 25 bp, Artificial Sequence
  Description of Artificial Sequence: Synthetic probe
ccggaggcatcggtgacgtcgaaaa

SEQ ID NO: 647 - DNA, 25 bp, Artificial Sequence
  Description of Artificial Sequence: Synthetic probe
ggaagtaaatgtctcacccgtcggg

SEQ ID NO: 648 - DNA, 25 bp, Artificial Sequence
  Description of Artificial Sequence: Synthetic probe
agaagtgggccctcctcgcggtaag

SEQ ID NO: 649 - DNA, 25 bp, Artificial Sequence
  Description of Artificial Sequence: Synthetic probe
gcaaaacgtacttctgtgacgtcgt

SEQ ID NO: 650 - DNA, 25 bp, Artificial Sequence
  Description of Artificial Sequence: Synthetic probe
aggttcgacacttcttcgcacaggg

SEQ ID NO: 651 - DNA, 25 bp, Artificial Sequence
  Description of Artificial Sequence: Synthetic probe
attctaccaacggtcctacagcgga

SEQ ID NO: 652 - DNA, 25 bp, Artificial Sequence
  Description of Artificial Sequence: Synthetic probe
ggactggattgtttcgttacctaag

SEQ ID NO: 653 - DNA, 25 bp, Artificial Sequence
  Description of Artificial Sequence: Synthetic probe
gttattagtgtggaacctccttgga

SEQ ID NO: 654 - DNA, 25 bp, Artificial Sequence
  Description of Artificial Sequence: Synthetic probe
aagagcagtatcagcactctccact

SEQ ID NO: 655 - DNA, 25 bp, Artificial Sequence
  Description of Artificial Sequence: Synthetic probe
gccaattgcgtgagacatggaccta

SEQ ID NO: 656 - DNA, 25 bp, Artificial Sequence
  Description of Artificial Sequence: Synthetic probe
ttaccttgtaatattcgacgtcctg

SEQ ID NO: 657 - DNA, 25 bp, Artificial Sequence
  Description of Artificial Sequence: Synthetic probe
agtcgtacgcatcaaggttcttcgg

SEQ ID NO: 658 - DNA, 25 bp, Artificial Sequence
  Description of Artificial Sequence: Synthetic probe
agtcacctaaccttagattttaccg

SEQ ID NO: 659 - DNA, 25 bp, Artificial Sequence
  Description of Artificial Sequence: Synthetic probe
ccgtgacgctggtgattttgacatt

SEQ ID NO: 660 - skipped

SEQ ID NO: 661 - DNA, 25 bp, Artificial Sequence
  Description of Artificial Sequence: Synthetic probe
gattaccattgatacatcggtgtag

SEQ ID NO: 662 - skipped

SEQ ID NO: 663 - DNA, 25 bp, Artificial Sequence
  Description of Artificial Sequence: Synthetic probe
caacctcatttgtgggcgccgtatc

SEQ ID NO: 664 - DNA, 25 bp, Artificial Sequence
  Description of Artificial Sequence: Synthetic probe
tgtttcaatcccaactaccctggtc

SEQ ID NO: 665 - DNA, 25 bp, Artificial Sequence
  Description of Artificial Sequence: Synthetic probe
ccggcacaaccgttctgcggagtag

SEQ ID NO: 666 - DNA, 25 bp, Artificial Sequence
  Description of Artificial Sequence: Synthetic probe
atctacgttttgtttgttatctccg

SEQ ID NO: 667 - DNA, 25 bp, Artificial Sequence
  Description of Artificial Sequence: Synthetic probe
gaggttcaggtcattattgttgttc

SEQ ID NO: 668 - DNA, 25 bp, Artificial Sequence
  Description of Artificial Sequence: Synthetic probe
atggtggtcagcttcaacatcgccc

SEQ ID NO: 669 - DNA, 25 bp, Artificial Sequence
  Description of Artificial Sequence: Synthetic probe
atcatagtaagtcttaacgggccta

SEQ ID NO: 670 - DNA, 25 bp, Artificial Sequence
  Description of Artificial Sequence: Synthetic probe
gaccgggtgttggtgcggctattac

SEQ ID NO: 671 - DNA, 25 bp, Artificial Sequence
  Description of Artificial Sequence: Synthetic probe
agaaggagcccgaccaggttctacc

SEQ ID NO: 672 - DNA, 25 bp, Artificial Sequence
  Description of Artificial Sequence: Synthetic probe
gtggtggtgcccactgtggtcctac

SEQ ID NO: 673 - DNA, 25 bp, Artificial Sequence
  Description of Artificial Sequence: Synthetic probe
ctgtgtgtgcccttcacaagaggtt

SEQ ID NO: 674 - DNA, 25 bp, Artificial Sequence
  Description of Artificial Sequence: Synthetic probe
ctcggcgcccagctgcgtgcgtgca

SEQ ID NO: 675 - DNA, 25 bp, Artificial Sequence
  Description of Artificial Sequence: Synthetic probe
ggagactctcccaaaggaaccatag

SEQ ID NO: 676 - DNA, 25 bp, Artificial Sequence
  Description of Artificial Sequence: Synthetic probe
ctcgagtctcccagaggtccattgt

SEQ ID NO: 677 - DNA, 25 bp, Artificial Sequence
  Description of Artificial Sequence: Synthetic probe
ctttatcccagaaatggtgaccggt

SEQ ID NO: 678 - DNA, 25 bp, Artificial Sequence
  Description of Artificial Sequence: Synthetic probe
actatctactcccagtagtgacgcg

SEQ ID NO: 679 - DNA, 25 bp, Artificial Sequence
  Description of Artificial Sequence: Synthetic probe
gtctgccgacccaccgtttatgttt

SEQ ID NO: 680 - DNA, 25 bp, Artificial Sequence
  Description of Artificial Sequence: Synthetic probe
ggacacacacccacgtgtaaacaca

SEQ ID NO: 681 - DNA, 25 bp, Artificial Sequence
  Description of Artificial Sequence: Synthetic probe
aagacctacccacgtccgacatggt

SEQ ID NO: 682 - DNA, 25 bp, Artificial Sequence
  Description of Artificial Sequence: Synthetic probe
gtacgcttaggccagtcttgaccag

SEQ ID NO: 683 - DNA, 25 bp, Artificial Sequence
  Description of Artificial Sequence: Synthetic probe
gaaggtcttcccgttgttcgctcca

SEQ ID NO: 684 - DNA, 25 bp, Artificial Sequence
  Description of Artificial Sequence: Synthetic probe
gaacttccgtccctgcactgaaagg

SEQ ID NO: 685 - DNA, 25 bp, Artificial Sequence
  Description of Artificial Sequence: Synthetic probe
ccgaatctccctctgtgtagagtct

SEQ ID NO: 686 - DNA, 25 bp, Artificial Sequence
  Description of Artificial Sequence: Synthetic probe
ttactagacgttccagagtcagggg

SEQ ID NO: 687 - DNA, 25 bp, Artificial Sequence
  Description of Artificial Sequence: Synthetic probe
gatcctttccactcgcgctagagcg

SEQ ID NO: 688 - DNA, 25 bp, Artificial Sequence
  Description of Artificial Sequence: Synthetic probe
cgccgcagtccaccgccgacggcgt

SEQ ID NO: 689 - DNA, 25 bp, Artificial Sequence
  Description of Artificial Sequence: Synthetic probe
ctctccgtgtccaaagttctgtgta

SEQ ID NO: 690 - DNA, 25 bp, Artificial Sequence
  Description of Artificial Sequence: Synthetic probe
agtccagacccttcgtgactggtcg

SEQ ID NO: 691 - DNA, 25 bp, Artificial Sequence
  Description of Artificial Sequence: Synthetic probe
ataagagaccctcactgagtcacgg

SEQ ID NO: 692 - DNA, 25 bp, Artificial Sequence
  Description of Artificial Sequence: Synthetic probe
aggtccgaccctctcacgagtggat

SEQ ID NO: 693 - DNA, 25 bp, Artificial Sequence
  Description of Artificial Sequence: Synthetic probe
gtacacacaggccttcacacacggg

SEQ ID NO: 694 - DNA, 25 bp, Artificial Sequence
  Description of Artificial Sequence: Synthetic probe
agagtttccctaaagttctacgaca

SEQ ID NO: 695 - DNA, 25 bp, Artificial Sequence
  Description of Artificial Sequence: Synthetic probe
gtcacgcctcgcctcagccaagacc

SEQ ID NO: 696 - DNA, 25 bp, Artificial Sequence
  Description of Artificial Sequence: Synthetic probe
ggaccgggcctaccacgaccgaggt

SEQ ID NO: 697 - DNA, 25 bp, Artificial Sequence
  Description of Artificial Sequence: Synthetic probe
acgaccagcgcctagacgacatgga

SEQ ID NO: 698 - DNA, 25 bp, Artificial Sequence
  Description of Artificial Sequence: Synthetic probe
actccgtcctcctttctggatgaag

SEQ ID NO: 699 - DNA, 25 bp, Artificial Sequence
  Description of Artificial Sequence: Synthetic probe
gttacggacctcctcacatcggcag

SEQ ID NO: 700 - DNA, 25 bp, Artificial Sequence
  Description of Artificial Sequence: Synthetic probe
ggttcggtgtcctcgaatcgtgtca

SEQ ID NO: 701 - DNA, 25 bp, Artificial Sequence
  Description of Artificial Sequence: Synthetic probe
ggtctccacgtcctcgttcaagtgt

SEQ ID NO: 702 - DNA, 25 bp, Artificial Sequence
  Description of Artificial Sequence: Synthetic probe
cttcttgtcctaaccggtctacgca

SEQ ID NO: 703 - DNA, 25 bp, Artificial Sequence
  Description of Artificial Sequence: Synthetic probe
tttaagctcctaccggatagagtgt

SEQ ID NO: 704 - DNA, 25 bp, Artificial Sequence
  Description of Artificial Sequence: Synthetic probe
aatcctacaccactcctcttcgacg

SEQ ID NO: 705 - DNA, 25 bp, Artificial Sequence
  Description of Artificial Sequence: Synthetic probe
agaccacacacctttgactgccacc

SEQ ID NO: 706 - DNA, 25 bp, Artificial Sequence
  Description of Artificial Sequence: Synthetic probe
aatccggtccgacatcgaccaggag

SEQ ID NO: 707 - DNA, 25 bp, Artificial Sequence
  Description of Artificial Sequence: Synthetic probe
ccgcacgactccgacttttaccgta

SEQ ID NO: 708 - DNA, 25 bp, Artificial Sequence
  Description of Artificial Sequence: Synthetic probe
aagagttcccgttatttcaatccgt

SEQ ID NO: 709 - DNA, 25 bp, Artificial Sequence
  Description of Artificial Sequence: Synthetic probe
cgattggccgttaaactatggtttc

SEQ ID NO: 710 - DNA, 25 bp, Artificial Sequence
  Description of Artificial Sequence: Synthetic probe
gtttttacccgtcctcgtgtcactg

SEQ ID NO: 711 - DNA, 25 bp, Artificial Sequence
  Description of Artificial Sequence: Synthetic probe
acaacaacaccgtcctcgtgaggtc

SEQ ID NO: 712 - DNA, 25 bp, Artificial Sequence
  Description of Artificial Sequence: Synthetic probe
tccgtcgctgggtgatggaacatga

SEQ ID NO: 713 - DNA, 25 bp, Artificial Sequence
  Description of Artificial Sequence: Synthetic probe
ccggtcgttggttgagtgtttatga

SEQ ID NO: 714 - DNA, 25 bp, Artificial Sequence
  Description of Artificial Sequence: Synthetic probe
attcccaggacaccaccagagggct

SEQ ID NO: 715 - DNA, 25 bp, Artificial Sequence
  Description of Artificial Sequence: Synthetic probe
atccggttagggagtgtgtccaatt

SEQ ID NO: 716 - DNA, 25 bp, Artificial Sequence
  Description of Artificial Sequence: Synthetic probe
cgaggacagtaggaacggagaaccc

SEQ ID NO: 717 - DNA, 25 bp, Artificial Sequence
  Description of Artificial Sequence: Synthetic probe
tcttgaagaggtcccgcgaccgtgt

SEQ ID NO: 718 - DNA, 25 bp, Artificial Sequence
  Description of Artificial Sequence: Synthetic probe
tcaagaactaggtcgcgacgagggt

SEQ ID NO: 719 - DNA, 25 bp, Artificial Sequence
  Description of Artificial Sequence: Synthetic probe
gcgcggcccggctgggcgtagaggg

SEQ ID NO: 720 - DNA, 25 bp, Artificial Sequence
  Description of Artificial Sequence: Synthetic probe
cccgtcttgcctcgataggtaggtc

SEQ ID NO: 721 - DNA, 25 bp, Artificial Sequence
  Description of Artificial Sequence: Synthetic probe
gccactgcggctaggacactcgtaa

SEQ ID NO: 722 - DNA, 25 bp, Artificial Sequence
  Description of Artificial Sequence: Synthetic probe
ctctcaatgcgctttcctcaggagg

SEQ ID NO: 723 - DNA, 25 bp, Artificial Sequence
  Description of Artificial Sequence: Synthetic probe
acgacgcaggcaacttcgttggcgg

SEQ ID NO: 724 - DNA, 25 bp, Artificial Sequence
  Description of Artificial Sequence: Synthetic probe
gtccggacggcagatatcagatacc

SEQ ID NO: 725 - DNA, 25 bp, Artificial Sequence
  Description of Artificial Sequence: Synthetic probe
gcacgtcaccaaccttcgtagtcga

SEQ ID NO: 726 - DNA, 25 bp, Artificial Sequence
  Description of Artificial Sequence: Synthetic probe
cgtatctacaaacggaggagaacct

SEQ ID NO: 727 - DNA, 25 bp, Artificial Sequence
  Description of Artificial Sequence: Synthetic probe
aactacttccacagtgttgccgttc

SEQ ID NO: 728 - DNA, 25 bp, Artificial Sequence
  Description of Artificial Sequence: Synthetic probe
gtccatctccacactggggtcctga

SEQ ID NO: 729 - DNA, 25 bp, Artificial Sequence
  Description of Artificial Sequence: Synthetic probe
gtcctaccaccactagttgcacggg

SEQ ID NO: 730 - DNA, 25 bp, Artificial Sequence
  Description of Artificial Sequence: Synthetic probe
gaccctctgacacccactaggaggt

SEQ ID NO: 731 - DNA, 25 bp, Artificial Sequence
  Description of Artificial Sequence: Synthetic probe
gataacccacacaacatttgtcttc

SEQ ID NO: 732 - DNA, 25 bp, Artificial Sequence
  Description of Artificial Sequence: Synthetic probe
acaaacagacacgaagattttccag

SEQ ID NO: 733 - DNA, 25 bp, Artificial Sequence
  Description of Artificial Sequence: Synthetic probe
cggtccgtcggatatccttatcatt

SEQ ID NO: 734 - DNA, 25 bp, Artificial Sequence
  Description of Artificial Sequence: Synthetic probe
cgatcgggtgaggtgtctaaaaact

SEQ ID NO: 735 - skipped

SEQ ID NO: 736 - DNA, 25 bp, Artificial Sequence
  Description of Artificial Sequence: Synthetic probe
attcccacgatacgcgagtcagagg

SEQ ID NO: 737 - DNA, 25 bp, Artificial Sequence
  Description of Artificial Sequence: Synthetic probe
gcaaagggacacactccaccacggt

SEQ ID NO: 738 - DNA, 25 bp, Artificial Sequence
  Description of Artificial Sequence: Synthetic probe
gttctctgtacgtattgtgcaaaat

SEQ ID NO: 739 - DNA, 25 bp, Artificial Sequence
  Description of Artificial Sequence: Synthetic probe
gtaaataacttgttcgatcggacaa

SEQ ID NO: 740 - DNA, 25 bp, Artificial Sequence
  Description of Artificial Sequence: Synthetic probe
acctagagtcctttcgacggtcgta

SEQ ID NO: 741 - DNA, 25 bp, Artificial Sequence
  Description of Artificial Sequence: Synthetic probe
agagacgggttccactcccttgagt

SEQ ID NO: 742 - DNA, 25 bp, Artificial Sequence
  Description of Artificial Sequence: Synthetic probe
cgacgtacaagtatcagtaggtgga

SEQ ID NO: 743 - DNA, 25 bp, Artificial Sequence
  Description of Artificial Sequence: Synthetic probe
aagaatttcgtggtgtagttggaat

SEQ ID NO: 744 - DNA, 25 bp, Artificial Sequence
  Description of Artificial Sequence: Synthetic probe
acatagtgtcctctttggtcgtccc

SEQ ID NO: 745 - DNA, 25 bp, Artificial Sequence
  Description of Artificial Sequence: Synthetic probe
cccggtgtctagtccacgaagacgt

SEQ ID NO: 746 - DNA, 25 bp, Artificial Sequence
  Description of Artificial Sequence: Synthetic probe
ggaagaggtctactgcaccgacagt

SEQ ID NO: 747 - DNA, 25 bp, Artificial Sequence
  Description of Artificial Sequence: Synthetic probe
acccggtatgccatcataaatcaac

SEQ ID NO: 748 - skipped

SEQ ID NO: 749 - DNA, 25 bp, Artificial Sequence
  Description of Artificial Sequence: Synthetic probe
gggacaacgcccactccgccgacga

SEQ ID NO: 750 - DNA, 25 bp, Artificial Sequence
  Description of Artificial Sequence: Synthetic probe
gaagcacgtcgcccagtcaattaga

SEQ ID NO: 751 - DNA, 25 bp, Artificial Sequence
  Description of Artificial Sequence: Synthetic probe
ctgaccgacccaagagtcaacctcg

SEQ ID NO: 752 - DNA, 25 bp, Artificial Sequence
  Description of Artificial Sequence: Synthetic probe
atcggaacccatgtgtgtgtaggaa

SEQ ID NO: 753 - DNA, 25 bp, Artificial Sequence
  Description of Artificial Sequence: Synthetic probe
gccgggacccagaccaaccacttcg

SEQ ID NO: 754 - DNA, 25 bp, Artificial Sequence
  Description of Artificial Sequence: Synthetic probe
gtggtttcccagcaccgacgactgt

SEQ ID NO: 755 - DNA, 25 bp, Artificial Sequence
  Description of Artificial Sequence: Synthetic probe
agtctccgtcccagtacctccaagg

SEQ ID NO: 756 - DNA, 25 bp, Artificial Sequence
  Description of Artificial Sequence: Synthetic probe
gaggggcccacactcgtaccatctt

SEQ ID NO: 757 - skipped

SEQ ID NO: 758 - DNA, 25 bp, Artificial Sequence
  Description of Artificial Sequence: Synthetic probe
aggggtcccactgccgacgacactt

SEQ ID NO: 759 - DNA, 25 bp, Artificial Sequence
  Description of Artificial Sequence: Synthetic probe
accacaacccacgtaggacgcggtg

SEQ ID NO: 760 - DNA, 25 bp, Artificial Sequence
  Description of Artificial Sequence: Synthetic probe
gcgccgcgcgccagctgccagccag

SEQ ID NO: 761 - DNA, 25 bp, Artificial Sequence
  Description of Artificial Sequence: Synthetic probe
atccgccgccaagcagggcgaggta

SEQ ID NO: 762 - DNA, 25 bp, Artificial Sequence
  Description of Artificial Sequence: Synthetic probe
accactactgccagggtgatccttg

SEQ ID NO: 763 - skipped

SEQ ID NO: 764 - DNA, 25 bp, Artificial Sequence
  Description of Artificial Sequence: Synthetic probe
catacgccgccagccggatgggggc

SEQ ID NO: 765 - DNA, 25 bp, Artificial Sequence
  Description of Artificial Sequence: Synthetic probe
ggcacgccgccatcgacaagaagag

SEQ ID NO: 766 - DNA, 25 bp, Artificial Sequence
  Description of Artificial Sequence: Synthetic probe
atacgccacgccacatgcaagacgg

SEQ ID NO: 767 - DNA, 25 bp, Artificial Sequence
  Description of Artificial Sequence: Synthetic probe
ggatcgccgccactgaaaaaaccgc

SEQ ID NO: 768 - DNA, 25 bp, Artificial Sequence
  Description of Artificial Sequence: Synthetic probe
cgcgcgccgccagcttgcaccaccc

SEQ ID NO: 769 - DNA, 25 bp, Artificial Sequence
  Description of Artificial Sequence: Synthetic probe
atggacacgccaacacgccgcaaga

SEQ ID NO: 770 - DNA, 25 bp, Artificial Sequence
  Description of Artificial Sequence: Synthetic probe
agagacaccgccaccgaatcgtgag

SEQ ID NO: 771 - DNA, 25 bp, Artificial Sequence
  Description of Artificial Sequence: Synthetic probe
taaagggccacacaccgcactgtac

SEQ ID NO: 772 - DNA, 25 bp, Artificial Sequence
  Description of Artificial Sequence: Synthetic probe
gtgtggtgtgccaccggaaaaagtc

SEQ ID NO: 773 - DNA, 25 bp, Artificial Sequence
  Description of Artificial Sequence: Synthetic probe
ggttaatgccaccaccgacaacatg

SEQ ID NO: 774 - DNA, 25 bp, Artificial Sequence
  Description of Artificial Sequence: Synthetic probe
gaccaccacgccacgacgagtagtt

SEQ ID NO: 775 - DNA, 25 bp, Artificial Sequence
  Description of Artificial Sequence: Synthetic probe
tcgtgcacggccacactcggcaagg

SEQ ID NO: 776 - DNA, 25 bp, Artificial Sequence
  Description of Artificial Sequence: Synthetic probe
agtaccgaccgccactctagaaggt

SEQ ID NO: 777 - DNA, 25 bp, Artificial Sequence
  Description of Artificial Sequence: Synthetic probe
agggttcgccacaccacacctggag

SEQ ID NO: 778 - DNA, 25 bp, Artificial Sequence
  Description of Artificial Sequence: Synthetic probe
gtcgtgtgtcgtgccactcagcgta

SEQ ID NO: 779 - DNA, 25 bp, Artificial Sequence
  Description of Artificial Sequence: Synthetic probe
gagttactccgccacgacgtcaaag

SEQ ID NO: 780 - DNA, 25 bp, Artificial Sequence
  Description of Artificial Sequence: Synthetic probe
gaaaccgttcccgatgccacctcaa

SEQ ID NO: 781 - DNA, 25 bp, Artificial Sequence
  Description of Artificial Sequence: Synthetic probe
cgtcgactcgttcccgttcgaaagc

SEQ ID NO: 782 - DNA, 25 bp, Artificial Sequence
  Description of Artificial Sequence: Synthetic probe
tcctctgctccctcgggttgtacaa

SEQ ID NO: 783 - DNA, 25 bp, Artificial Sequence
  Description of Artificial Sequence: Synthetic probe
tgggtcactcccgtacaccgacgtg

SEQ ID NO: 784 - DNA, 25 bp, Artificial Sequence
  Description of Artificial Sequence: Synthetic probe
atagtgggtcccttatgcattggtc

SEQ ID NO: 785 - skipped

SEQ ID NO: 786 - DNA, 25 bp, Artificial Sequence
  Description of Artificial Sequence: Synthetic probe
aaagagactcccacgaccacggtag

SEQ ID NO: 787 - DNA, 25 bp, Artificial Sequence
  Description of Artificial Sequence: Synthetic probe
gtcccacggtcccaagaacatgaaa

SEQ ID NO: 788 - DNA, 25 bp, Artificial Sequence
  Description of Artificial Sequence: Synthetic probe
tctgcctgtcccacgcacgggagta

SEQ ID NO: 789 - DNA, 25 bp, Artificial Sequence
  Description of Artificial Sequence: Synthetic probe
gaacccgcgtcccacgagtcgaaga

SEQ ID NO: 790 - DNA, 25 bp, Artificial Sequence
  Description of Artificial Sequence: Synthetic probe
gaattccgtcccgtagacctcgata

SEQ ID NO: 791 - DNA, 25 bp, Artificial Sequence
  Description of Artificial Sequence: Synthetic probe
gtgtgtccgacgtcccgttctccga

SEQ ID NO: 792 - DNA, 25 bp, Artificial Sequence
  Description of Artificial Sequence: Synthetic probe
tcgacggacctccagggcgtcatct

SEQ ID NO: 793 - DNA, 25 bp, Artificial Sequence
  Description of Artificial Sequence: Synthetic probe
acccagactccaacgaggtgtagac

SEQ ID NO: 794 - skipped

SEQ ID NO: 795 - DNA, 25 bp, Artificial Sequence
  Description of Artificial Sequence: Synthetic probe
ggtcccgactccactaagacgatgg

SEQ ID NO: 796 - DNA, 25 bp, Artificial Sequence
  Description of Artificial Sequence: Synthetic probe
gtcacagtgttccacaccgaactcg

SEQ ID NO: 797 - DNA, 25 bp, Artificial Sequence
  Description of Artificial Sequence: Synthetic probe
gctgtctatatccacacacacatgt

SEQ ID NO: 798 - DNA, 25 bp, Artificial Sequence
  Description of Artificial Sequence: Synthetic probe
ctccgtcgtatccacaggtgttcga

SEQ ID NO: 799 - skipped

SEQ ID NO: 800 - DNA, 25 bp, Artificial Sequence
  Description of Artificial Sequence: Synthetic probe
aggacgctgtccaagtccatccggc

SEQ ID NO: 801 - DNA, 25 bp, Artificial Sequence
  Description of Artificial Sequence: Synthetic probe
aacacgcgtctccaccacggcccgg

SEQ ID NO: 802 - DNA, 25 bp, Artificial Sequence
  Description of Artificial Sequence: Synthetic probe
agtcgaggctccactacggtctcgg

SEQ ID NO: 803 - DNA, 25 bp, Artificial Sequence
  Description of Artificial Sequence: Synthetic probe
acgaagaagtccaggcgcaagagcg

SEQ ID NO: 804 - DNA, 25 bp, Artificial Sequence
  Description of Artificial Sequence: Synthetic probe
cccacggtccaggagtttattcttc

SEQ ID NO: 805 - DNA, 25 bp, Artificial Sequence
  Description of Artificial Sequence: Synthetic probe
tgtccgccgtccacccacgaaagga

SEQ ID NO: 806 - DNA, 25 bp, Artificial Sequence
  Description of Artificial Sequence: Synthetic probe
tggcgcacgtccagccgagcgcaga

SEQ ID NO: 807 - DNA, 25 bp, Artificial Sequence
  Description of Artificial Sequence: Synthetic probe
gcgccgcagtccaccgccgacggcg

SEQ ID NO: 808 - DNA, 25 bp, Artificial Sequence
  Description of Artificial Sequence: Synthetic probe
acgccaccgtccacagtgtcggttt

SEQ ID NO: 809 - DNA, 25 bp, Artificial Sequence
  Description of Artificial Sequence: Synthetic probe
cgtccgaacgtccacagggcacggg

SEQ ID NO: 810 - DNA, 25 bp, Artificial Sequence
  Description of Artificial Sequence: Synthetic probe
acagcgccgtccatgtggacgtcca

SEQ ID NO: 811 - DNA, 25 bp, Artificial Sequence
  Description of Artificial Sequence: Synthetic probe
ctgtacctcgtccatcagtgtcggt

SEQ ID NO: 812 - DNA, 25 bp, Artificial Sequence
  Description of Artificial Sequence: Synthetic probe
tctgacgtccgtccagtctccaggg

SEQ ID NO: 813 - DNA, 25 bp, Artificial Sequence
  Description of Artificial Sequence: Synthetic probe
cacacacacgtccatgtatatgtgt

SEQ ID NO: 814 - DNA, 25 bp, Artificial Sequence
  Description of Artificial Sequence: Synthetic probe
atcgaagacgtccaccacgacctag

SEQ ID NO: 815 - DNA, 25 bp, Artificial Sequence
  Description of Artificial Sequence: Synthetic probe
gtgcttccgtccaccatatttagtg

SEQ ID NO: 816 - DNA, 25 bp, Artificial Sequence
  Description of Artificial Sequence: Synthetic probe
acggttacacgtccacacacaggtc

SEQ ID NO: 817 - DNA, 25 bp, Artificial Sequence
  Description of Artificial Sequence: Synthetic probe
accaccgacccttttattcctaggg

SEQ ID NO: 818 - DNA, 25 bp, Artificial Sequence
  Description of Artificial Sequence: Synthetic probe
cgacccgacccttaagtatctgtgg

SEQ ID NO: 819 - DNA, 25 bp, Artificial Sequence
  Description of Artificial Sequence: Synthetic probe
accctcgaccctgagcgtttggagt

SEQ ID NO: 820 - DNA, 25 bp, Artificial Sequence
  Description of Artificial Sequence: Synthetic probe
agtctccgaccctcgcttcgtcacg

SEQ ID NO: 821 - DNA, 25 bp, Artificial Sequence
  Description of Artificial Sequence: Synthetic probe
tgtgtggtgcctcttctaaacctat

SEQ ID NO: 822 - DNA, 25 bp, Artificial Sequence
  Description of Artificial Sequence: Synthetic probe
gtgtgtgtgtgccttacactctccc

SEQ ID NO: 823 - DNA, 25 bp, Artificial Sequence
  Description of Artificial Sequence: Synthetic probe
aaagggcctgaacgacgaccgaccg

SEQ ID NO: 824 - DNA, 25 bp, Artificial Sequence
  Description of Artificial Sequence: Synthetic probe
atgtcgtggcctgtgtttcaatacg

SEQ ID NO: 825 - DNA, 25 bp, Artificial Sequence
  Description of Artificial Sequence: Synthetic probe
cgagaccgcgcctctcttagcctca

SEQ ID NO: 826 - DNA, 25 bp, Artificial Sequence
  Description of Artificial Sequence: Synthetic probe
accgaccacgcctgtagtcttgtat

SEQ ID NO: 827 - DNA, 25 bp, Artificial Sequence
  Description of Artificial Sequence: Synthetic probe
acgttcctaccctacaagtcttctt

SEQ ID NO: 828 - DNA, 25 bp, Artificial Sequence
  Description of Artificial Sequence: Synthetic probe
atccgtcctcctgtttaagttcact

SEQ ID NO: 829 - DNA, 25 bp, Artificial Sequence
  Description of Artificial Sequence: Synthetic probe
catttatcctgtggtgtacgtattc

SEQ ID NO: 830 - DNA, 25 bp, Artificial Sequence
  Description of Artificial Sequence: Synthetic probe
acgccacactcctctacttaagggt

SEQ ID NO: 831 - DNA, 25 bp, Artificial Sequence
  Description of Artificial Sequence: Synthetic probe
gtgtgacccgtcctctcccaatttg

SEQ ID NO: 832 - DNA, 25 bp, Artificial Sequence
  Description of Artificial Sequence: Synthetic probe
cgacgagggtcctccgtccgtttat

SEQ ID NO: 833 - DNA, 25 bp, Artificial Sequence
  Description of Artificial Sequence: Synthetic probe
agattggtcctaacggagtcacagg

SEQ ID NO: 834 - DNA, 25 bp, Artificial Sequence
  Description of Artificial Sequence: Synthetic probe
atctcaccgtcctcgtgtcggattc

SEQ ID NO: 835 - DNA, 25 bp, Artificial Sequence
  Description of Artificial Sequence: Synthetic probe
tcagtgaccgtcctcgttggaagtg

SEQ ID NO: 836 - DNA, 25 bp, Artificial Sequence
  Description of Artificial Sequence: Synthetic probe
attcccgtcctcagggtactactct

SEQ ID NO: 837 - DNA, 25 bp, Artificial Sequence
  Description of Artificial Sequence: Synthetic probe
aactagaatcctacggcccacgggt

SEQ ID NO: 838 - DNA, 25 bp, Artificial Sequence
  Description of Artificial Sequence: Synthetic probe
ataattcaccacgaccatttttctc

SEQ ID NO: 839 - DNA, 25 bp, Artificial Sequence
  Description of Artificial Sequence: Synthetic probe
cacacacacacccagatgtatgtgt

SEQ ID NO: 840 - DNA, 25 bp, Artificial Sequence
  Description of Artificial Sequence: Synthetic probe
ttaccgtcgtcacccattgcgaagg

SEQ ID NO: 841 - DNA, 25 bp, Artificial Sequence
  Description of Artificial Sequence: Synthetic probe
cacgcacacacccacccacgcgtaa

SEQ ID NO: 842 - DNA, 25 bp, Artificial Sequence
  Description of Artificial Sequence: Synthetic probe
ggtcctacgtcacccgataatcggt

SEQ ID NO: 843 - DNA, 25 bp, Artificial Sequence
  Description of Artificial Sequence: Synthetic probe
cgcggacacacccacgtgtaaacac

SEQ ID NO: 844 - DNA, 25 bp, Artificial Sequence
  Description of Artificial Sequence: Synthetic probe
aacacacacacccacgtgtaaacac

SEQ ID NO: 845 - DNA, 25 bp, Artificial Sequence
  Description of Artificial Sequence: Synthetic probe
gacacacacacacccagatgtatgt

SEQ ID NO: 846 - DNA, 25 bp, Artificial Sequence
  Description of Artificial Sequence: Synthetic probe
cacacagacacccagacgcgtgtat

SEQ ID NO: 847 - DNA, 25 bp, Artificial Sequence
  Description of Artificial Sequence: Synthetic probe
tcccaccgaccacgagcatagatgt

SEQ ID NO: 848 - DNA, 25 bp, Artificial Sequence
  Description of Artificial Sequence: Synthetic probe
aactaacacacccacggggtaaaga

SEQ ID NO: 849 - DNA, 25 bp, Artificial Sequence
  Description of Artificial Sequence: Synthetic probe
tgggtgacacccgacgtacgacacg

SEQ ID NO: 850 - DNA, 25 bp, Artificial Sequence
  Description of Artificial Sequence: Synthetic probe
ccacgggacccacagtcgaggtcat

SEQ ID NO: 851 - DNA, 25 bp, Artificial Sequence
  Description of Artificial Sequence: Synthetic probe
gccttggacccacgtaaagtaagta

SEQ ID NO: 852 - DNA, 25 bp, Artificial Sequence
  Description of Artificial Sequence: Synthetic probe
tgagtccagacccaaccgatgtttc

SEQ ID NO: 853 - DNA, 25 bp, Artificial Sequence
  Description of Artificial Sequence: Synthetic probe
tacgaccccgacccacaaggcggga

SEQ ID NO: 854 - DNA, 25 bp, Artificial Sequence
  Description of Artificial Sequence: Synthetic probe
accctaccgacccaaaagatcagag

SEQ ID NO: 855 - DNA, 25 bp, Artificial Sequence
  Description of Artificial Sequence: Synthetic probe
atgtctgattcatgtatttgaaggt

SEQ ID NO: 856 - DNA, 25 bp, Artificial Sequence
  Description of Artificial Sequence: Synthetic probe
acgttcccgaccctacttacgaaga

SEQ ID NO: 857 - DNA, 25 bp, Artificial Sequence
  Description of Artificial Sequence: Synthetic probe
atgccgaaccaagacggacctgcgt

SEQ ID NO: 858 - DNA, 25 bp, Artificial Sequence
  Description of Artificial Sequence: Synthetic probe
agtagtcaccaccaacatatggttg

SEQ ID NO: 859 - DNA, 25 bp, Artificial Sequence
  Description of Artificial Sequence: Synthetic probe
gttaaaaaccaccaccgctgttagg

SEQ ID NO: 860 - DNA, 25 bp, Artificial Sequence
  Description of Artificial Sequence: Synthetic probe
agtccgacgacaccatggtcccgta

SEQ ID NO: 861 - DNA, 25 bp, Artificial Sequence
  Description of Artificial Sequence: Synthetic probe
gtcttcgtcacaccagagcgttcaa

SEQ ID NO: 862 - DNA, 25 bp, Artificial Sequence
  Description of Artificial Sequence: Synthetic probe
gttccgcaaccaccgccaacgtcgc

SEQ ID NO: 863 - DNA, 25 bp, Artificial Sequence
  Description of Artificial Sequence: Synthetic probe
tcgtcggcacaccacatcgagtcgt

SEQ ID NO: 864 - DNA, 25 bp, Artificial Sequence
  Description of Artificial Sequence: Synthetic probe
ttgaaccaccacaggcactcggagc

SEQ ID NO: 865 - DNA, 25 bp, Artificial Sequence
  Description of Artificial Sequence: Synthetic probe
aaaagaaccactcactaccagtagg

SEQ ID NO: 866 - DNA, 25 bp, Artificial Sequence
  Description of Artificial Sequence: Synthetic probe
gaacacacacaccacgtcgaggcgg

SEQ ID NO: 867 - DNA, 25 bp, Artificial Sequence
  Description of Artificial Sequence: Synthetic probe
gtaaggacacaccacctaccgttgt

SEQ ID NO: 868 - skipped

SEQ ID NO: 869 - DNA, 25 bp, Artificial Sequence
  Description of Artificial Sequence: Synthetic probe
cgtctcccgaccaatgtcttcgggg

SEQ ID NO: 870 - skipped

SEQ ID NO: 871 - DNA, 25 bp, Artificial Sequence
  Description of Artificial Sequence: Synthetic probe
acgttacccgaccacacttgtcaag

SEQ ID NO: 872 - DNA, 25 bp, Artificial Sequence
  Description of Artificial Sequence: Synthetic probe
cctagtcgacgaccagacaccaggt

SEQ ID NO: 873 - DNA, 25 bp, Artificial Sequence
  Description of Artificial Sequence: Synthetic probe
gtgtccttcgaccactgccgctact

SEQ ID NO: 874 - DNA, 25 bp, Artificial Sequence
  Description of Artificial Sequence: Synthetic probe
cgtcacccgaccacggtggggcttg

SEQ ID NO: 875 - DNA, 25 bp, Artificial Sequence
  Description of Artificial Sequence: Synthetic probe
ttagtcccgaccacactatacaggt

SEQ ID NO: 876 - DNA, 25 bp, Artificial Sequence
  Description of Artificial Sequence: Synthetic probe
ggagacacagaccacacacctgggg

SEQ ID NO: 877 - DNA, 25 bp, Artificial Sequence
  Description of Artificial Sequence: Synthetic probe
aggtatcagaccacacacacgtctt

SEQ ID NO: 878 - DNA, 25 bp, Artificial Sequence
  Description of Artificial Sequence: Synthetic probe
atttccgaccacgagtcctttggag

SEQ ID NO: 879 - DNA, 25 bp, Artificial Sequence
  Description of Artificial Sequence: Synthetic probe
acaacagagaccaccacgacgtaca

SEQ ID NO: 880 - DNA, 25 bp, Artificial Sequence
  Description of Artificial Sequence: Synthetic probe
gttccacctacccaacaacgggtga

SEQ ID NO: 881 - DNA, 25 bp, Artificial Sequence
  Description of Artificial Sequence: Synthetic probe
gaagccctacccaacactccagagt

SEQ ID NO: 882 - DNA, 25 bp, Artificial Sequence
  Description of Artificial Sequence: Synthetic probe
cgctcccgaccacgaagacgggtag

SEQ ID NO: 883 - DNA, 25 bp, Artificial Sequence
  Description of Artificial Sequence: Synthetic probe
tgattctacgaccaccacacggtgt

SEQ ID NO: 884 - DNA, 25 bp, Artificial Sequence
  Description of Artificial Sequence: Synthetic probe
agatgacacgaccacaccgcagtat

SEQ ID NO: 885 - DNA, 25 bp, Artificial Sequence
  Description of Artificial Sequence: Synthetic probe
agttccatacccacacgacacgagg

SEQ ID NO: 886 - DNA, 25 bp, Artificial Sequence
  Description of Artificial Sequence: Synthetic probe
acacacattaccacacacatcacca

SEQ ID NO: 887 - DNA, 25 bp, Artificial Sequence
  Description of Artificial Sequence: Synthetic probe
ggtacctacctacccgactgagcat

SEQ ID NO: 888 - DNA, 25 bp, Artificial Sequence
  Description of Artificial Sequence: Synthetic probe
ctcgacacacgtacccgaagagggg

SEQ ID NO: 889 - DNA, 25 bp, Artificial Sequence
  Description of Artificial Sequence: Synthetic probe
aatcattaccatccgacgactaccg

SEQ ID NO: 890 - DNA, 25 bp, Artificial Sequence
  Description of Artificial Sequence: Synthetic probe
cgtcacactcaccttttcattactt

SEQ ID NO: 891 - DNA, 25 bp, Artificial Sequence
  Description of Artificial Sequence: Synthetic probe
acacacgtccacctgcaaggaaagt

SEQ ID NO: 892 - DNA, 25 bp, Artificial Sequence
  Description of Artificial Sequence: Synthetic probe
aggtcccacctgacgacgcacatga

SEQ ID NO: 893 - DNA, 25 bp, Artificial Sequence
  Description of Artificial Sequence: Synthetic probe
cgatcgctcacctttcgtccggaga

SEQ ID NO: 894 - DNA, 25 bp, Artificial Sequence
  Description of Artificial Sequence: Synthetic probe
atgtcaccacctgtccgtaggttcg

SEQ ID NO: 895 - DNA, 25 bp, Artificial Sequence
  Description of Artificial Sequence: Synthetic probe
gtgtgtcctcacctcacctgcagga

SEQ ID NO: 896 - DNA, 25 bp, Artificial Sequence
  Description of Artificial Sequence: Synthetic probe
gttatcgtctgacctgtccttctat

SEQ ID NO: 897 - DNA, 25 bp, Artificial Sequence
  Description of Artificial Sequence: Synthetic probe
cggacccgacctggatacacaagat

SEQ ID NO: 898 - DNA, 25 bp, Artificial Sequence
  Description of Artificial Sequence: Synthetic probe
gtcacactcgtagacctggatcccg

SEQ ID NO: 899 - DNA, 25 bp, Artificial Sequence
  Description of Artificial Sequence: Synthetic probe
ccgaccacgacctgaagtagttgcg

SEQ ID NO: 900 - DNA, 25 bp, Artificial Sequence
  Description of Artificial Sequence: Synthetic probe
gaccgtccaacctacgaactacttt

SEQ ID NO: 901 - DNA, 25 bp, Artificial Sequence
  Description of Artificial Sequence: Synthetic probe
ggccaccgacctaagtgtttctgaa

SEQ ID NO: 902 - DNA, 25 bp, Artificial Sequence
  Description of Artificial Sequence: Synthetic probe
acatccgacgacctagcgttcacgt

SEQ ID NO: 903 - DNA, 25 bp, Artificial Sequence
  Description of Artificial Sequence: Synthetic probe
agaacggaaccgccgggtcgggcga

SEQ ID NO: 904 - DNA, 25 bp, Artificial Sequence
  Description of Artificial Sequence: Synthetic probe
cgtctctacctacctaagctacgtt

SEQ ID NO: 905 - DNA, 25 bp, Artificial Sequence
  Description of Artificial Sequence: Synthetic probe
ccctacctacctgaggctcgtggga

SEQ ID NO: 906 - DNA, 25 bp, Artificial Sequence
  Description of Artificial Sequence: Synthetic probe
tgatgagtcgtacctttgttctact

SEQ ID NO: 907 - DNA, 25 bp, Artificial Sequence
  Description of Artificial Sequence: Synthetic probe
tcaccaccaccggactgaagagtac

SEQ ID NO: 908 - DNA, 25 bp, Artificial Sequence
  Description of Artificial Sequence: Synthetic probe
cacgccgcccgggcattcaagcgga

SEQ ID NO: 909 - DNA, 25 bp, Artificial Sequence
  Description of Artificial Sequence: Synthetic probe
tgaccgtccaccgtgtatccactgg

SEQ ID NO: 910 - skipped

SEQ ID NO: 911 - DNA, 25 bp, Artificial Sequence
  Description of Artificial Sequence: Synthetic probe
agaaccgacccggagaaccgtcttt

SEQ ID NO: 912 - DNA, 25 bp, Artificial Sequence
  Description of Artificial Sequence: Synthetic probe
accctgtcccggaaggcttaccaca

SEQ ID NO: 913 - DNA, 25 bp, Artificial Sequence
  Description of Artificial Sequence: Synthetic probe
agaaccacccgcacggacgtagtga

SEQ ID NO: 914 - DNA, 25 bp, Artificial Sequence
  Description of Artificial Sequence: Synthetic probe
agcagccgccgctcgtctaggactt

SEQ ID NO: 915 - DNA, 25 bp, Artificial Sequence
  Description of Artificial Sequence: Synthetic probe
ccgccggccgcctgccgcagcccct

SEQ ID NO: 916 - DNA, 25 bp, Artificial Sequence
  Description of Artificial Sequence: Synthetic probe
aagttcacgccgcacacgcggttcg

SEQ ID NO: 917 - DNA, 25 bp, Artificial Sequence
  Description of Artificial Sequence: Synthetic probe
gtccaagacccgcaagaggtcccgg

SEQ ID NO: 918 - DNA, 25 bp, Artificial Sequence
  Description of Artificial Sequence: Synthetic probe
gaatcccaccgaccacgagcataga

SEQ ID NO: 919 - skipped

SEQ ID NO: 920 - DNA, 25 bp, Artificial Sequence
  Description of Artificial Sequence: Synthetic probe
ttgacaccgtccgtcccggaacagg

SEQ ID NO: 921 - DNA, 25 bp, Artificial Sequence
  Description of Artificial Sequence: Synthetic probe
ctacggaggccggttcttcagaaac

SEQ ID NO: 922 - DNA, 25 bp, Artificial Sequence
  Description of Artificial Sequence: Synthetic probe
atccacagccgcaggacgtccaccg

SEQ ID NO: 923 - DNA, 25 bp, Artificial Sequence
  Description of Artificial Sequence: Synthetic probe
gtaaagtgcccgacgcccaccgaaa

SEQ ID NO: 924 - DNA, 25 bp, Artificial Sequence
  Description of Artificial Sequence: Synthetic probe
cctacgaccccgacccacaaggcgg

SEQ ID NO: 925 - DNA, 25 bp, Artificial Sequence
  Description of Artificial Sequence: Synthetic probe
atactccgacccgatttattagacg

SEQ ID NO: 926 - DNA, 25 bp, Artificial Sequence
  Description of Artificial Sequence: Synthetic probe
ctgccgacccgaactattgtgtgag

SEQ ID NO: 927 - DNA, 25 bp, Artificial Sequence
  Description of Artificial Sequence: Synthetic probe
gccacggcccgagcgccgcaggggc

SEQ ID NO: 928 - DNA, 25 bp, Artificial Sequence
  Description of Artificial Sequence: Synthetic probe
tcccgacacccgagacgtcggaggt

SEQ ID NO: 929 - DNA, 25 bp, Artificial Sequence
  Description of Artificial Sequence: Synthetic probe
ggacgacaacccgacgcaaaggatc

SEQ ID NO: 930 - DNA, 25 bp, Artificial Sequence
  Description of Artificial Sequence: Synthetic probe
cgactcgttcccgactcgtttgttt

SEQ ID NO: 931 - DNA, 25 bp, Artificial Sequence
  Description of Artificial Sequence: Synthetic probe
aaataacccgaccacgttttcgtta

SEQ ID NO: 932 - DNA, 25 bp, Artificial Sequence
  Description of Artificial Sequence: Synthetic probe
aactaagacccgaccacgttaaaga

SEQ ID NO: 933 - DNA, 25 bp, Artificial Sequence
  Description of Artificial Sequence: Synthetic probe
aaccaccaccgctgttagggttgtt

SEQ ID NO: 934 - DNA, 25 bp, Artificial Sequence
  Description of Artificial Sequence: Synthetic probe
gaaataagccgacacaccgtcaccg

SEQ ID NO: 935 - DNA, 25 bp, Artificial Sequence
  Description of Artificial Sequence: Synthetic probe
caaagatccggttagggagtgtgtc

SEQ ID NO: 936 - DNA, 25 bp, Artificial Sequence
  Description of Artificial Sequence: Synthetic probe
ccgccgtctccggttcatgagatcg

SEQ ID NO: 937 - DNA, 25 bp, Artificial Sequence
  Description of Artificial Sequence: Synthetic probe
gtttccatccgcacgacacgacgag

SEQ ID NO: 938 - DNA, 25 bp, Artificial Sequence
  Description of Artificial Sequence: Synthetic probe
ttttggtccgcgcacgccgctgcag

SEQ ID NO: 939 - DNA, 25 bp, Artificial Sequence
  Description of Artificial Sequence: Synthetic probe
gtgttctcctccgaaggcctcatcg

SEQ ID NO: 940 - DNA, 25 bp, Artificial Sequence
  Description of Artificial Sequence: Synthetic probe
acaggcctccgaggcacgacgacgg

SEQ ID NO: 941 - DNA, 25 bp, Artificial Sequence
  Description of Artificial Sequence: Synthetic probe
tcgttccatccgaccgagaggttgt

SEQ ID NO: 942 - DNA, 25 bp, Artificial Sequence
  Description of Artificial Sequence: Synthetic probe
gtggtgtgtgccgtcaactccacca

SEQ ID NO: 943 - DNA, 25 bp, Artificial Sequence
  Description of Artificial Sequence: Synthetic probe
cgtttccgtccgatttgaaccagat

SEQ ID NO: 944 - DNA, 25 bp, Artificial Sequence
  Description of Artificial Sequence: Synthetic probe
attttctccgacgacaagttagggt

SEQ ID NO: 945 - DNA, 25 bp, Artificial Sequence
  Description of Artificial Sequence: Synthetic probe
gtccgcacgactccgacttttaccg

SEQ ID NO: 946 - DNA, 25 bp, Artificial Sequence
  Description of Artificial Sequence: Synthetic probe
aggaccgacccgtctcaggattcgt

SEQ ID NO: 947 - DNA, 25 bp, Artificial Sequence
  Description of Artificial Sequence: Synthetic probe
aactcatcccgtgtaggttgtgtat

SEQ ID NO: 948 - DNA, 25 bp, Artificial Sequence
  Description of Artificial Sequence: Synthetic probe
ccgtcctcccgttctagagagttta

SEQ ID NO: 949 - DNA, 25 bp, Artificial Sequence
  Description of Artificial Sequence: Synthetic probe
gaccaccgcgccgtcctgggaggcc

SEQ ID NO: 950 - DNA, 25 bp, Artificial Sequence
  Description of Artificial Sequence: Synthetic probe
gtatctcatcccgtcgtccctggaa

SEQ ID NO: 951 - DNA, 25 bp, Artificial Sequence
  Description of Artificial Sequence: Synthetic probe
gtgtttccgccgtccgtgtcctgac

SEQ ID NO: 952 - DNA, 25 bp, Artificial Sequence
  Description of Artificial Sequence: Synthetic probe
gacgatcgcgctccgtccgttaatg

SEQ ID NO: 953 - DNA, 25 bp, Artificial Sequence
  Description of Artificial Sequence: Synthetic probe
aactccctccgtccatagtacgtta

SEQ ID NO: 954 - DNA, 25 bp, Artificial Sequence
  Description of Artificial Sequence: Synthetic probe
gtactcggcagtccgtagcccggaa

SEQ ID NO: 955 - DNA, 25 bp, Artificial Sequence
  Description of Artificial Sequence: Synthetic probe
gtgaaatcgtccgtgtgttatttac

SEQ ID NO: 956 - DNA, 25 bp, Artificial Sequence
  Description of Artificial Sequence: Synthetic probe
acctcaccgtccgtcaagaggagat

SEQ ID NO: 957 - DNA, 25 bp, Artificial Sequence
  Description of Artificial Sequence: Synthetic probe
accacttcgtccgtcacagagacga

SEQ ID NO: 958 - DNA, 25 bp, Artificial Sequence
  Description of Artificial Sequence: Synthetic probe
agacgacacgactccgtacttctgt

SEQ ID NO: 959 - skipped

SEQ ID NO: 960 - DNA, 25 bp, Artificial Sequence
  Description of Artificial Sequence: Synthetic probe
attttacaccggtccgtgtgtccga

SEQ ID NO: 961 - DNA, 25 bp, Artificial Sequence
  Description of Artificial Sequence: Synthetic probe
ccacgagaaccggacaagggaactg

SEQ ID NO: 962 - skipped

SEQ ID NO: 963 - DNA, 25 bp, Artificial Sequence
  Description of Artificial Sequence: Synthetic probe
acagagacgacaccggacttgtgac

SEQ ID NO: 964 - DNA, 25 bp, Artificial Sequence
  Description of Artificial Sequence: Synthetic probe
ccactaggaccggtagacacgacac

SEQ ID NO: 965 - DNA, 25 bp, Artificial Sequence
  Description of Artificial Sequence: Synthetic probe
gtccagccaccgacgagagaggctt

SEQ ID NO: 966 - DNA, 25 bp, Artificial Sequence
  Description of Artificial Sequence: Synthetic probe
acccaccaccgacccatctctacga

SEQ ID NO: 967 - DNA, 25 bp, Artificial Sequence
  Description of Artificial Sequence: Synthetic probe
ctcgaaaaccgacacgacattactt

SEQ ID NO: 968 - DNA, 25 bp, Artificial Sequence
  Description of Artificial Sequence: Synthetic probe
aatcccaccgaccacgagcatagat

SEQ ID NO: 969 - DNA, 25 bp, Artificial Sequence
  Description of Artificial Sequence: Synthetic probe
agtgcaccaccgacaacctagaagt

SEQ ID NO: 970 - DNA, 25 bp, Artificial Sequence
  Description of Artificial Sequence: Synthetic probe
gggactgtcaccgacaccgcaagaa

SEQ ID NO: 971 - DNA, 25 bp, Artificial Sequence
  Description of Artificial Sequence: Synthetic probe
cgtcccaaccgacacgaagaagaga

SEQ ID NO: 972 - DNA, 25 bp, Artificial Sequence
  Description of Artificial Sequence: Synthetic probe
ctatgataaccgaaccgaagctcgt

SEQ ID NO: 973 - DNA, 25 bp, Artificial Sequence
  Description of Artificial Sequence: Synthetic probe
aaaacaaccgaccacgtgtagcggc

SEQ ID NO: 974 - DNA, 25 bp, Artificial Sequence
  Description of Artificial Sequence: Synthetic probe
gtaagggaaccgaccacgaccagga

SEQ ID NO: 975 - DNA, 25 bp, Artificial Sequence
  Description of Artificial Sequence: Synthetic probe
atgtggtcaccgactcagcgttcag

SEQ ID NO: 976 - DNA, 25 bp, Artificial Sequence
  Description of Artificial Sequence: Synthetic probe
gggtcaccaccgacaacgatcgaag

SEQ ID NO: 977 - DNA, 25 bp, Artificial Sequence
  Description of Artificial Sequence: Synthetic probe
agacttcgcaccgacacttaaggtg

SEQ ID NO: 978 - DNA, 25 bp, Artificial Sequence
  Description of Artificial Sequence: Synthetic probe
gagaccacgacaccgaattgtaagt

SEQ ID NO: 979 - DNA, 25 bp, Artificial Sequence
  Description of Artificial Sequence: Synthetic probe
gcggccaaccgaccagtgtctacat

SEQ ID NO: 980 - DNA, 25 bp, Artificial Sequence
  Description of Artificial Sequence: Synthetic probe
aatgtcgcaccgactacgacgagga

SEQ ID NO: 981 - DNA, 25 bp, Artificial Sequence
  Description of Artificial Sequence: Synthetic probe
agaagtcgcaccgacgcacgtctac

SEQ ID NO: 982 - DNA, 25 bp, Artificial Sequence
  Description of Artificial Sequence: Synthetic probe
gtaatttcaccgacgacgagtaagt

SEQ ID NO: 983 - DNA, 25 bp, Artificial Sequence
  Description of Artificial Sequence: Synthetic probe
gaacgacaacgaccgatactacact

SEQ ID NO: 984 - DNA, 25 bp, Artificial Sequence
  Description of Artificial Sequence: Synthetic probe
aagtccaaccgttcccggtggagcc

SEQ ID NO: 985 - DNA, 25 bp, Artificial Sequence
  Description of Artificial Sequence: Synthetic probe
acactccacaccgtgccgcagacac

SEQ ID NO: 986 - DNA, 25 bp, Artificial Sequence
  Description of Artificial Sequence: Synthetic probe
ccgacgaccaccgtcggcaccagta

SEQ ID NO: 987 - DNA, 25 bp, Artificial Sequence
  Description of Artificial Sequence: Synthetic probe
tccgcagacaccgtcacgcagggga

SEQ ID NO: 988 - skipped

SEQ ID NO: 989 - DNA, 25 bp, Artificial Sequence
  Description of Artificial Sequence: Synthetic probe
ggcggtaccggggttggtgtgtgac

SEQ ID NO: 990 - DNA, 25 bp, Artificial Sequence
  Description of Artificial Sequence: Synthetic probe
cacatgtgggggtgtgttccgattc

SEQ ID NO: 991 - DNA, 25 bp, Artificial Sequence
  Description of Artificial Sequence: Synthetic probe
aaattcggggtgtgggaacctctac

SEQ ID NO: 992 - skipped

SEQ ID NO: 993 - DNA, 25 bp, Artificial Sequence
  Description of Artificial Sequence: Synthetic probe
tctatccgtggggtcggtacctcgt

SEQ ID NO: 994 - DNA, 25 bp, Artificial Sequence
  Description of Artificial Sequence: Synthetic probe
cttgttggggtgtgctccgtcacca

SEQ ID NO: 995 - DNA, 25 bp, Artificial Sequence
  Description of Artificial Sequence: Synthetic probe
acccgcacggggctcgacgccaaca

SEQ ID NO: 996 - DNA, 25 bp, Artificial Sequence
  Description of Artificial Sequence: Synthetic probe
gtggtcacggggcacacacccttcg

SEQ ID NO: 997 - DNA, 25 bp, Artificial Sequence
  Description of Artificial Sequence: Synthetic probe
ctccgtgacggggtgaccacacgac

SEQ ID NO: 998 - DNA, 25 bp, Artificial Sequence
  Description of Artificial Sequence: Synthetic probe
attcccgggattccgacacgacagg

SEQ ID NO: 999 - DNA, 25 bp, Artificial Sequence
  Description of Artificial Sequence: Synthetic probe
agaactggggcttctcctaccacgc

SEQ ID NO: 1000 - DNA, 25 bp, Artificial Sequence
  Description of Artificial Sequence: Synthetic probe
aggtccagggcctcatcaccactgt

SEQ ID NO: 1001 - DNA, 25 bp, Artificial Sequence
  Description of Artificial Sequence: Synthetic probe
accactggggcaccaccgtcgcacc

SEQ ID NO: 1002 - DNA, 25 bp, Artificial Sequence
  Description of Artificial Sequence: Synthetic probe
acctgaagggctttttcttcgaccg

SEQ ID NO: 1003 - DNA, 25 bp, Artificial Sequence
  Description of Artificial Sequence: Synthetic probe
cccaccgggcgcacacagacacaca

SEQ ID NO: 1004 - DNA, 25 bp, Artificial Sequence
  Description of Artificial Sequence: Synthetic probe
cggcccgggcgtaaaaacgagcctt

SEQ ID NO: 1005 - DNA, 25 bp, Artificial Sequence
  Description of Artificial Sequence: Synthetic probe
cgaaccacgggcacaccagtgacgt

SEQ ID NO: 1006 - DNA, 25 bp, Artificial Sequence
  Description of Artificial Sequence: Synthetic probe
gtcactggcgggctatctttctcct

SEQ ID NO: 1007 - DNA, 25 bp, Artificial Sequence
  Description of Artificial Sequence: Synthetic probe
accctcggggaaatacccgaccggt

SEQ ID NO: 1008 - DNA, 25 bp, Artificial Sequence
  Description of Artificial Sequence: Synthetic probe
agtgttgtcgggacacaccagggtc

SEQ ID NO: 1009 - DNA, 25 bp, Artificial Sequence
  Description of Artificial Sequence: Synthetic probe
gacctccacgggacacacggtgttt

SEQ ID NO: 1010 - DNA, 25 bp, Artificial Sequence
  Description of Artificial Sequence: Synthetic probe
cctccacgggacacaggtcgtcgtg

SEQ ID NO: 1011 - DNA, 25 bp, Artificial Sequence
  Description of Artificial Sequence: Synthetic probe
ttgcgtttggggtgcgacgctcctc

SEQ ID NO: 1012 - DNA, 25 bp, Artificial Sequence
  Description of Artificial Sequence: Synthetic probe
ttcctcgttggggtgcgtatccacc

SEQ ID NO: 1013 - DNA, 25 bp, Artificial Sequence
  Description of Artificial Sequence: Synthetic probe
cactctttggggtggtagtggaacc

SEQ ID NO: 1014 - DNA, 25 bp, Artificial Sequence
  Description of Artificial Sequence: Synthetic probe
actgaacttgggttggtgtctgacc

SEQ ID NO: 1015 - DNA, 25 bp, Artificial Sequence
  Description of Artificial Sequence: Synthetic probe
aagactattgggtggtggtacctgt

SEQ ID NO: 1016 - skipped

SEQ ID NO: 1017 - DNA, 25 bp, Artificial Sequence
  Description of Artificial Sequence: Synthetic probe
ctttgtatgggagtctggttcacac

SEQ ID NO: 1018 - DNA, 25 bp, Artificial Sequence
  Description of Artificial Sequence: Synthetic probe
agtgttggtgggctatggtgctgca

SEQ ID NO: 1019 - DNA, 25 bp, Artificial Sequence
  Description of Artificial Sequence: Synthetic probe
cgaggtaggtgggtctcagaccctc

SEQ ID NO: 1020 - DNA, 25 bp, Artificial Sequence
  Description of Artificial Sequence: Synthetic probe
tttgtggtggcgtgatactaatcgg

SEQ ID NO: 1021 - DNA, 25 bp, Artificial Sequence
  Description of Artificial Sequence: Synthetic probe
gcaggtggtggggactgttatcctc

SEQ ID NO: 1022 - skipped

SEQ ID NO: 1023 - DNA, 25 bp, Artificial Sequence
  Description of Artificial Sequence: Synthetic probe
ctcggtgtgtgggtaatattcttta

SEQ ID NO: 1024 - skipped

SEQ ID NO: 1025 - DNA, 25 bp, Artificial Sequence
  Description of Artificial Sequence: Synthetic probe
agtaggtggtgggtacttctccgta

SEQ ID NO: 1026 - DNA, 25 bp, Artificial Sequence
  Description of Artificial Sequence: Synthetic probe
ctaagtgtgtgggttacgtgtctct

SEQ ID NO: 1027 - DNA, 25 bp, Artificial Sequence
  Description of Artificial Sequence: Synthetic probe
tcctgtgtgtgggtccggtctccct

SEQ ID NO: 1028 - DNA, 25 bp, Artificial Sequence
  Description of Artificial Sequence: Synthetic probe
acgtggtggtggctcccgaactaca

SEQ ID NO: 1029 - skipped

SEQ ID NO: 1030 - DNA, 25 bp, Artificial Sequence
  Description of Artificial Sequence: Synthetic probe
ctttatatggagtcgtgtggtcttc

SEQ ID NO: 1031 - DNA, 25 bp, Artificial Sequence
  Description of Artificial Sequence: Synthetic probe
gtgtgtgtgttggactccctcccga

SEQ ID NO: 1032 - DNA, 25 bp, Artificial Sequence
  Description of Artificial Sequence: Synthetic probe
gtttgtggtggaatgatacttcgac

SEQ ID NO: 1033 - DNA, 25 bp, Artificial Sequence
  Description of Artificial Sequence: Synthetic probe
aggtatcggtggacgcctccgcctt

SEQ ID NO: 1034 - DNA, 25 bp, Artificial Sequence
  Description of Artificial Sequence: Synthetic probe
tatcgtgagtgtggatccaaggttc

SEQ ID NO: 1035 - DNA, 25 bp, Artificial Sequence
  Description of Artificial Sequence: Synthetic probe
gtgggtggtggactgaccctaaacc

SEQ ID NO: 1036 - DNA, 25 bp, Artificial Sequence
  Description of Artificial Sequence: Synthetic probe
actacacgagtgtggagtccttact

SEQ ID NO: 1037 - DNA, 25 bp, Artificial Sequence
  Description of Artificial Sequence: Synthetic probe
ctgtgtggtggacttcactgagccc

SEQ ID NO: 1038 - DNA, 25 bp, Artificial Sequence
  Description of Artificial Sequence: Synthetic probe
agatctgcgggtgtggcactcccga

SEQ ID NO: 1039 - DNA, 25 bp, Artificial Sequence
  Description of Artificial Sequence: Synthetic probe
cggtaccggggttggtgtgtgaccc

SEQ ID NO: 1040 - DNA, 25 bp, Artificial Sequence
  Description of Artificial Sequence: Synthetic probe
gtcggcgttgtggacgtcgacatcc

SEQ ID NO: 1041 - DNA, 25 bp, Artificial Sequence
  Description of Artificial Sequence: Synthetic probe
ttaccctgggttggtggagtaccac

SEQ ID NO: 1042 - DNA, 25 bp, Artificial Sequence
  Description of Artificial Sequence: Synthetic probe
gtttgctgggtggtgacatattcac

SEQ ID NO: 1043 - DNA, 25 bp, Artificial Sequence
  Description of Artificial Sequence: Synthetic probe
ctgtgttgggtggtggtaccctcag

SEQ ID NO: 1044 - DNA, 25 bp, Artificial Sequence
  Description of Artificial Sequence: Synthetic probe
ttggcgtgggtttgtgacgacccat

SEQ ID NO: 1045 - DNA, 25 bp, Artificial Sequence
  Description of Artificial Sequence: Synthetic probe
cactattgggtggtggtaacctggt

SEQ ID NO: 1046 - skipped

SEQ ID NO: 1047 - DNA, 25 bp, Artificial Sequence
  Description of Artificial Sequence: Synthetic probe
ggaaatgggtgtgtctgcgacttcc

SEQ ID NO: 1048 - DNA, 25 bp, Artificial Sequence
  Description of Artificial Sequence: Synthetic probe
cttacgttgggtgagtgttttattt

SEQ ID NO: 1049 - DNA, 25 bp, Artificial Sequence
  Description of Artificial Sequence: Synthetic probe
catggtgggtgtgttcctcctagcc

SEQ ID NO: 1050 - DNA, 25 bp, Artificial Sequence
  Description of Artificial Sequence: Synthetic probe
gtccacatgggtgtgtgacctctgt

SEQ ID NO: 1051 - DNA, 25 bp, Artificial Sequence
  Description of Artificial Sequence: Synthetic probe
ttcggagtgggtgtgttcagtcaac

SEQ ID NO: 1052 - DNA, 25 bp, Artificial Sequence
  Description of Artificial Sequence: Synthetic probe
agggactacgggtgtcgtgctcttt

SEQ ID NO: 1053 - DNA, 25 bp, Artificial Sequence
  Description of Artificial Sequence: Synthetic probe
acgcccagggtgactttacgcgcgt

SEQ ID NO: 1054 - DNA, 25 bp, Artificial Sequence
  Description of Artificial Sequence: Synthetic probe
cttcctgggtgtgttcttaagatcg

SEQ ID NO: 1055 - DNA, 25 bp, Artificial Sequence
  Description of Artificial Sequence: Synthetic probe
ttagtgtggggtctttgtcagagct

SEQ ID NO: 1056 - DNA, 25 bp, Artificial Sequence
  Description of Artificial Sequence: Synthetic probe
ggttgtgtgggtctcacgttaccta

SEQ ID NO: 1057 - DNA, 25 bp, Artificial Sequence
  Description of Artificial Sequence: Synthetic probe
aaacctgggtcggtgtgtttgtcct

SEQ ID NO: 1058 - DNA, 25 bp, Artificial Sequence
  Description of Artificial Sequence: Synthetic probe
gtccagacacgggtctttcctctga

SEQ ID NO: 1059 - skipped

SEQ ID NO: 1060 - DNA, 25 bp, Artificial Sequence
  Description of Artificial Sequence: Synthetic probe
ctgtgtctgggtatcttcgctcgaa

SEQ ID NO: 1061 - DNA, 25 bp, Artificial Sequence
  Description of Artificial Sequence: Synthetic probe
caggtgtcgggtcatagatgtctcc

SEQ ID NO: 1062 - DNA, 25 bp, Artificial Sequence
  Description of Artificial Sequence: Synthetic probe
gtcggtaggtgggtaagtcactcca

SEQ ID NO: 1063 - DNA, 25 bp, Artificial Sequence
  Description of Artificial Sequence: Synthetic probe
agtgtgagtgggtacgaaaatgtac

SEQ ID NO: 1064 - skipped

SEQ ID NO: 1065 - DNA, 25 bp, Artificial Sequence
  Description of Artificial Sequence: Synthetic probe
aatccactggtggtggggttccagt

SEQ ID NO: 1066 - skipped

SEQ ID NO: 1067 - DNA, 25 bp, Artificial Sequence
  Description of Artificial Sequence: Synthetic probe
ctttgttggttgctggtcatgttct

SEQ ID NO: 1068 - DNA, 25 bp, Artificial Sequence
  Description of Artificial Sequence: Synthetic probe
caagtttggttgtcgctgttatcgg

SEQ ID NO: 1069 - DNA, 25 bp, Artificial Sequence
  Description of Artificial Sequence: Synthetic probe
ctatcgtttggtgtgagccgtgtcc

SEQ ID NO: 1070 - DNA, 25 bp, Artificial Sequence
  Description of Artificial Sequence: Synthetic probe
gactacgactacgatggttgcgacg

SEQ ID NO: 1071 - skipped

SEQ ID NO: 1072 - DNA, 25 bp, Artificial Sequence
  Description of Artificial Sequence: Synthetic probe
tcccttatggtgtgtctgacgggcc

SEQ ID NO: 1073 - DNA, 25 bp, Artificial Sequence
  Description of Artificial Sequence: Synthetic probe
ccgcacctggtcgaaccgccgacgt

SEQ ID NO: 1074 - DNA, 25 bp, Artificial Sequence
  Description of Artificial Sequence: Synthetic probe
catgtgtctggtgtgttacacggtg

SEQ ID NO: 1075 - DNA, 25 bp, Artificial Sequence
  Description of Artificial Sequence: Synthetic probe
ccaagtactggtggtgcctgaacgg

SEQ ID NO: 1076 - DNA, 25 bp, Artificial Sequence
  Description of Artificial Sequence: Synthetic probe
gggtcggttggtctagttgacttat

SEQ ID NO: 1077 - DNA, 25 bp, Artificial Sequence
  Description of Artificial Sequence: Synthetic probe
acttcggtgtggtgcgatgccagac

SEQ ID NO: 1078 - DNA, 25 bp, Artificial Sequence
  Description of Artificial Sequence: Synthetic probe
gtggtcacggtggtgcagtcccagg

SEQ ID NO: 1079 - skipped

SEQ ID NO: 1080 - DNA, 25 bp, Artificial Sequence
  Description of Artificial Sequence: Synthetic probe
ggtggttgtggttaacacgtcacct

SEQ ID NO: 1081 - DNA, 25 bp, Artificial Sequence
  Description of Artificial Sequence: Synthetic probe
tttgtggtggtgacgtttgccaagt

SEQ ID NO: 1082 - DNA, 25 bp, Artificial Sequence
  Description of Artificial Sequence: Synthetic probe
tcgcttaggtggtgcttgttgaaga

SEQ ID NO: 1083 - DNA, 25 bp, Artificial Sequence
  Description of Artificial Sequence: Synthetic probe
cagatggtggtgaaacttttctacc

SEQ ID NO: 1084 - DNA, 25 bp, Artificial Sequence
  Description of Artificial Sequence: Synthetic probe
cctcgtatgtggtggtgaggacaca

SEQ ID NO: 1085 - DNA, 25 bp, Artificial Sequence
  Description of Artificial Sequence: Synthetic probe
ctacgaacggtggtgggttactact

SEQ ID NO: 1086 - DNA, 25 bp, Artificial Sequence
  Description of Artificial Sequence: Synthetic probe
acaggtggtggtcttccttgggtaa

SEQ ID NO: 1087 - DNA, 25 bp, Artificial Sequence
  Description of Artificial Sequence: Synthetic probe
atgtttgtggtgctctgtcaaatcc

SEQ ID NO: 1088 - DNA, 25 bp, Artificial Sequence
  Description of Artificial Sequence: Synthetic probe
cgtgtcgttgtggttcttaggtgaa

SEQ ID NO: 1089 - DNA, 25 bp, Artificial Sequence
  Description of Artificial Sequence: Synthetic probe
accgggtgtggtgtcctcttcccgc

SEQ ID NO: 1090 - DNA, 25 bp, Artificial Sequence
  Description of Artificial Sequence: Synthetic probe
ataataggtggttgtggtcatgcac

SEQ ID NO: 1091 - DNA, 25 bp, Artificial Sequence
  Description of Artificial Sequence: Synthetic probe
gtacccgttgtggtgtgacgaacat

SEQ ID NO: 1092 - DNA, 25 bp, Artificial Sequence
  Description of Artificial Sequence: Synthetic probe
tagtggtggtggttactgctacgat

SEQ ID NO: 1093 - DNA, 25 bp, Artificial Sequence
  Description of Artificial Sequence: Synthetic probe
ttatcgtcagtggtggtgttatacg

SEQ ID NO: 1094 - DNA, 25 bp, Artificial Sequence
  Description of Artificial Sequence: Synthetic probe
ccttctagtggtggtgtcagttgtc

SEQ ID NO: 1095 - DNA, 25 bp, Artificial Sequence
  Description of Artificial Sequence: Synthetic probe
actcaacgtgtggtttgtgtccgac

SEQ ID NO: 1096 - DNA, 25 bp, Artificial Sequence
  Description of Artificial Sequence: Synthetic probe
acccgtttggtatgtgattgaaccc

SEQ ID NO: 1097 - DNA, 25 bp, Artificial Sequence
  Description of Artificial Sequence: Synthetic probe
catttgtggtgtgacgtgaacttgg

SEQ ID NO: 1098 - DNA, 25 bp, Artificial Sequence
  Description of Artificial Sequence: Synthetic probe
cgtgcttgtggtggcgtctgttccc

SEQ ID NO: 1099 - DNA, 25 bp, Artificial Sequence
  Description of Artificial Sequence: Synthetic probe
taccgacgggtggtgcgttatctac

SEQ ID NO: 1100 - DNA, 25 bp, Artificial Sequence
  Description of Artificial Sequence: Synthetic probe
attttgtggtggtctcgtgttcact

SEQ ID NO: 1101 - DNA, 25 bp, Artificial Sequence
  Description of Artificial Sequence: Synthetic probe
acacatcacgtggtgtgtgcaaacc

SEQ ID NO: 1102 - DNA, 25 bp, Artificial Sequence
  Description of Artificial Sequence: Synthetic probe
actgtgttgtggtgtctagagtctc

SEQ ID NO: 1103 - DNA, 25 bp, Artificial Sequence
  Description of Artificial Sequence: Synthetic probe
cgcgtttgtggtcgtcttagtgtcc

SEQ ID NO: 1104 - DNA, 25 bp, Artificial Sequence
  Description of Artificial Sequence: Synthetic probe
actcgcgactgtggtgtggtaccaa

SEQ ID NO: 1105 - DNA, 25 bp, Artificial Sequence
  Description of Artificial Sequence: Synthetic probe
ctaagcgtgtggtgttggtctttct

SEQ ID NO: 1106 - DNA, 25 bp, Artificial Sequence
  Description of Artificial Sequence: Synthetic probe
atgttgcgtggttttgagcgcccta

SEQ ID NO: 1107 - DNA, 25 bp, Artificial Sequence
  Description of Artificial Sequence: Synthetic probe
ctcactcgacgtggttcaaggtctc

SEQ ID NO: 1108 - DNA, 25 bp, Artificial Sequence
  Description of Artificial Sequence: Synthetic probe
gtggtcgtagttggtattttggatc

SEQ ID NO: 1109 - DNA, 25 bp, Artificial Sequence
  Description of Artificial Sequence: Synthetic probe
ggccgtggtggtcttcagtcctttt

SEQ ID NO: 1110 - DNA, 25 bp, Artificial Sequence
  Description of Artificial Sequence: Synthetic probe
atggtggtggtaccatacctgtcaa

SEQ ID NO: 1111 - DNA, 25 bp, Artificial Sequence
  Description of Artificial Sequence: Synthetic probe
gtaggtggtcgtggtacctcacagt

SEQ ID NO: 1112 - DNA, 25 bp, Artificial Sequence
  Description of Artificial Sequence: Synthetic probe
agacatcaaggccaagggcaactcg

SEQ ID NO: 1113 - DNA, 25 bp, Artificial Sequence
  Description of Artificial Sequence: Synthetic probe
acgtgtgaggtggtacagtacatct

SEQ ID NO: 1114 - DNA, 25 bp, Artificial Sequence
  Description of Artificial Sequence: Synthetic probe
cgtcgggtgtggtagactatgacac

SEQ ID NO: 1115 - DNA, 25 bp, Artificial Sequence
  Description of Artificial Sequence: Synthetic probe
atcttgtaagggtggtggtactcca

SEQ ID NO: 1116 - DNA, 25 bp, Artificial Sequence
  Description of Artificial Sequence: Synthetic probe
tgactcaacaggcaccaccacaggt

SEQ ID NO: 1117 - DNA, 25 bp, Artificial Sequence
  Description of Artificial Sequence: Synthetic probe
ctgtgtgtgaggctcattaaaccac

SEQ ID NO: 1118 - DNA, 25 bp, Artificial Sequence
  Description of Artificial Sequence: Synthetic probe
gcacctcaaggcgaaactgacaccg

SEQ ID NO: 1119 - DNA, 25 bp, Artificial Sequence
  Description of Artificial Sequence: Synthetic probe
acgaaccagagggccaaggtcacac

SEQ ID NO: 1120 - DNA, 25 bp, Artificial Sequence
  Description of Artificial Sequence: Synthetic probe
cttggagagggcactcgacgaccct

SEQ ID NO: 1121 - DNA, 25 bp, Artificial Sequence
  Description of Artificial Sequence: Synthetic probe
gtttccgaaggaatccacgcgccga

SEQ ID NO: 1122 - DNA, 25 bp, Artificial Sequence
  Description of Artificial Sequence: Synthetic probe
acgacccacaggatccaattctagg

SEQ ID NO: 1123 - DNA, 25 bp, Artificial Sequence
  Description of Artificial Sequence: Synthetic probe
acacgtacacacaggaaccggctta

SEQ ID NO: 1124 - DNA, 25 bp, Artificial Sequence
  Description of Artificial Sequence: Synthetic probe
atagacaccgaggatcaccgtcgga

SEQ ID NO: 1125 - DNA, 25 bp, Artificial Sequence
  Description of Artificial Sequence: Synthetic probe
acatcaagaggagtcgtaatcgtga

SEQ ID NO: 1126 - DNA, 25 bp, Artificial Sequence
  Description of Artificial Sequence: Synthetic probe
ccagacacgaggaggagattcaccc

SEQ ID NO: 1127 - DNA, 25 bp, Artificial Sequence
  Description of Artificial Sequence: Synthetic probe
tgctccgcgtaggagtgaagagcct

SEQ ID NO: 1128 - DNA, 25 bp, Artificial Sequence
  Description of Artificial Sequence: Synthetic probe
cgacgagtattaggaccgggtccat

SEQ ID NO: 1129 - DNA, 25 bp, Artificial Sequence
  Description of Artificial Sequence: Synthetic probe
cggtaagactaggaggtgcgaccac

SEQ ID NO: 1130 - DNA, 25 bp, Artificial Sequence
  Description of Artificial Sequence: Synthetic probe
ataggagaaggttttcagagaatcc

SEQ ID NO: 1131 - DNA, 25 bp, Artificial Sequence
  Description of Artificial Sequence: Synthetic probe
acagacgaaaggttagtggccacga

SEQ ID NO: 1132 - DNA, 25 bp, Artificial Sequence
  Description of Artificial Sequence: Synthetic probe
agtctcagtaaggtgtgtgtcccaa

SEQ ID NO: 1133 - DNA, 25 bp, Artificial Sequence
  Description of Artificial Sequence: Synthetic probe
cggtgtccaggtgttgcaagtagtc

SEQ ID NO: 1134 - DNA, 25 bp, Artificial Sequence
  Description of Artificial Sequence: Synthetic probe
ctttccaggtgtgtggagagccaat

SEQ ID NO: 1135 - DNA, 25 bp, Artificial Sequence
  Description of Artificial Sequence: Synthetic probe
actgttctcaggtgtgtgacttctt

SEQ ID NO: 1136 - DNA, 25 bp, Artificial Sequence
  Description of Artificial Sequence: Synthetic probe
atttatcaggtgtgtgtcgttctcc

SEQ ID NO: 1137 - DNA, 25 bp, Artificial Sequence
  Description of Artificial Sequence: Synthetic probe
acacgtccgcaggtcttccactttt

SEQ ID NO: 1138 - DNA, 25 bp, Artificial Sequence
  Description of Artificial Sequence: Synthetic probe
actacacacacaggtcagttgacgg

SEQ ID NO: 1139 - DNA, 25 bp, Artificial Sequence
  Description of Artificial Sequence: Synthetic probe
acctgttgaggtgttttgtgtcgaa

SEQ ID NO: 1140 - DNA, 25 bp, Artificial Sequence
  Description of Artificial Sequence: Synthetic probe
gctccaccgaggttcttacggagta

SEQ ID NO: 1141 - DNA, 25 bp, Artificial Sequence
  Description of Artificial Sequence: Synthetic probe
tcttctcccgggcttgcgtgcgagg

SEQ ID NO: 1142 - DNA, 25 bp, Artificial Sequence
  Description of Artificial Sequence: Synthetic probe
ccaccccgggcacgcagcaccgccg

SEQ ID NO: 1143 - DNA, 25 bp, Artificial Sequence
  Description of Artificial Sequence: Synthetic probe
ccgtccaccggggtcaatatgtgtg

SEQ ID NO: 1144 - DNA, 25 bp, Artificial Sequence
  Description of Artificial Sequence: Synthetic probe
ctctccgccgggttagaagactcta

SEQ ID NO: 1145 - DNA, 25 bp, Artificial Sequence
  Description of Artificial Sequence: Synthetic probe
tacaccgacaccggggtatcgacgc

SEQ ID NO: 1146 - DNA, 25 bp, Artificial Sequence
  Description of Artificial Sequence: Synthetic probe
gattggtccggcagcgaccgaccgt

SEQ ID NO: 1147 - DNA, 25 bp, Artificial Sequence
  Description of Artificial Sequence: Synthetic probe
ctcacacggcgggtctaacaatggt

SEQ ID NO: 1148 - DNA, 25 bp, Artificial Sequence
  Description of Artificial Sequence: Synthetic probe
ttcccgtccggcgaggaacctcgag

SEQ ID NO: 1149 - DNA, 25 bp, Artificial Sequence
  Description of Artificial Sequence: Synthetic probe
agcacttgcggcgtgtgtaccaaca

SEQ ID NO: 1150 - skipped

SEQ ID NO: 1151 - DNA, 25 bp, Artificial Sequence
  Description of Artificial Sequence: Synthetic probe
aaaacaccggaaccaacaggtcagc

SEQ ID NO: 1152 - DNA, 25 bp, Artificial Sequence
  Description of Artificial Sequence: Synthetic probe
agttggtgcggatttctcctttctt

SEQ ID NO: 1153 - DNA, 25 bp, Artificial Sequence
  Description of Artificial Sequence: Synthetic probe
ctcctctccggaccggaaacagagt

SEQ ID NO: 1154 - DNA, 25 bp, Artificial Sequence
  Description of Artificial Sequence: Synthetic probe
ctcacacccggacaaagtcagtagt

SEQ ID NO: 1155 - DNA, 25 bp, Artificial Sequence
  Description of Artificial Sequence: Synthetic probe
acacacacagcggacgatccataaa

SEQ ID NO: 1156 - DNA, 25 bp, Artificial Sequence
  Description of Artificial Sequence: Synthetic probe
ctccaagcggaaaacgtgcgtgcca

SEQ ID NO: 1157 - DNA, 25 bp, Artificial Sequence
  Description of Artificial Sequence: Synthetic probe
ttcaacatcggcgacgacgggacca

SEQ ID NO: 1158 - DNA, 25 bp, Artificial Sequence
  Description of Artificial Sequence: Synthetic probe
aagttgatcgggacacaccttttct

SEQ ID NO: 1159 - DNA, 25 bp, Artificial Sequence
  Description of Artificial Sequence: Synthetic probe
ctatctgttcgggtgtgttccttcg

SEQ ID NO: 1160 - DNA, 25 bp, Artificial Sequence
  Description of Artificial Sequence: Synthetic probe
ttttcgtgtcgggtgtcgcaccgag

SEQ ID NO: 1161 - DNA, 25 bp, Artificial Sequence
  Description of Artificial Sequence: Synthetic probe
ccggtgtgtcgggtttctccgacca

SEQ ID NO: 1162 - DNA, 25 bp, Artificial Sequence
  Description of Artificial Sequence: Synthetic probe
aggtcgtgttcggatggttcactac

SEQ ID NO: 1163 - DNA, 25 bp, Artificial Sequence
  Description of Artificial Sequence: Synthetic probe
ttggtctgcggtttcgatctttccc

SEQ ID NO: 1164 - DNA, 25 bp, Artificial Sequence
  Description of Artificial Sequence: Synthetic probe
cactcgacccggttccactttaaga

SEQ ID NO: 1165 - DNA, 25 bp, Artificial Sequence
  Description of Artificial Sequence: Synthetic probe
agaactgtgtcggtgggtcccacca

SEQ ID NO: 1166 - DNA, 25 bp, Artificial Sequence
  Description of Artificial Sequence: Synthetic probe
tcaccgtttcggtgtgggtcgatga

SEQ ID NO: 1167 - DNA, 25 bp, Artificial Sequence
  Description of Artificial Sequence: Synthetic probe
attactggtcggtctggcaaccctg

SEQ ID NO: 1168 - DNA, 25 bp, Artificial Sequence
  Description of Artificial Sequence: Synthetic probe
acaggtgtgtcggtatcgttaggtc

SEQ ID NO: 1169 - DNA, 25 bp, Artificial Sequence
  Description of Artificial Sequence: Synthetic probe
gttggactgtcggtgatttatcacc

SEQ ID NO: 1170 - DNA, 25 bp, Artificial Sequence
  Description of Artificial Sequence: Synthetic probe
aaactggtcggtggttctaaaggtc

SEQ ID NO: 1171 - DNA, 25 bp, Artificial Sequence
  Description of Artificial Sequence: Synthetic probe
cgtttcggtcggtgtatatgtgtac

SEQ ID NO: 1172 - DNA, 25 bp, Artificial Sequence
  Description of Artificial Sequence: Synthetic probe
agaaagaacggctccgaccgcagcc

SEQ ID NO: 1173 - DNA, 25 bp, Artificial Sequence
  Description of Artificial Sequence: Synthetic probe
cacacccacgggaagggtcactggt

SEQ ID NO: 1174 - DNA, 25 bp, Artificial Sequence
  Description of Artificial Sequence: Synthetic probe
aaaggtaacggcgacctcgtccgtc

SEQ ID NO: 1175 - DNA, 25 bp, Artificial Sequence
  Description of Artificial Sequence: Synthetic probe
tcttacacgacacggcagacacggg

SEQ ID NO: 1176 - DNA, 25 bp, Artificial Sequence
  Description of Artificial Sequence: Synthetic probe
ggacccgacacggaacctccgagtg

SEQ ID NO: 1177 - DNA, 25 bp, Artificial Sequence
  Description of Artificial Sequence: Synthetic probe
atccgaccacggtaaatctttactg

SEQ ID NO: 1178 - DNA, 25 bp, Artificial Sequence
  Description of Artificial Sequence: Synthetic probe
cggacacacacggaaaggaccgtag

SEQ ID NO: 1179 - DNA, 25 bp, Artificial Sequence
  Description of Artificial Sequence: Synthetic probe
gtacaactccgacggcgtactccgg

SEQ ID NO: 1180 - DNA, 25 bp, Artificial Sequence
  Description of Artificial Sequence: Synthetic probe
gtaccacacacacggaacatctagg

SEQ ID NO: 1181 - DNA, 25 bp, Artificial Sequence
  Description of Artificial Sequence: Synthetic probe
tgtgtgcttgcttgtttgcttcagt

SEQ ID NO: 1182 - DNA, 25 bp, Artificial Sequence
  Description of Artificial Sequence: Synthetic probe
taggacccgacggactcgaaaggtc

SEQ ID NO: 1183 - DNA, 25 bp, Artificial Sequence
  Description of Artificial Sequence: Synthetic probe
gacgacaccctacgggacgaggaac

SEQ ID NO: 1184 - DNA, 25 bp, Artificial Sequence
  Description of Artificial Sequence: Synthetic probe
cccatacacggtgtggtgggtcctc

SEQ ID NO: 1185 - DNA, 25 bp, Artificial Sequence
  Description of Artificial Sequence: Synthetic probe
gacacacacggtacgggtctaactt

SEQ ID NO: 1186 - DNA, 25 bp, Artificial Sequence
  Description of Artificial Sequence: Synthetic probe
tgtgaaccacggtcccagggctcgt

SEQ ID NO: 1187 - DNA, 25 bp, Artificial Sequence
  Description of Artificial Sequence: Synthetic probe
ctggtgaacggtcccacgactcatc

SEQ ID NO: 1188 - DNA, 25 bp, Artificial Sequence
  Description of Artificial Sequence: Synthetic probe
ggccgccggccaccgtggtgtgtat

SEQ ID NO: 1189 - DNA, 25 bp, Artificial Sequence
  Description of Artificial Sequence: Synthetic probe
caaaaggcccagcaccgtcgtagga

SEQ ID NO: 1190 - DNA, 25 bp, Artificial Sequence
  Description of Artificial Sequence: Synthetic probe
cgggccggccaccgcgcagccagac

SEQ ID NO: 1191 - DNA, 25 bp, Artificial Sequence
  Description of Artificial Sequence: Synthetic probe
aaaagaggcctcgactccgcgtttc

SEQ ID NO: 1192 - DNA, 25 bp, Artificial Sequence
  Description of Artificial Sequence: Synthetic probe
ggggcacggccaccgacgccaagta

SEQ ID NO: 1193 - DNA, 25 bp, Artificial Sequence
  Description of Artificial Sequence: Synthetic probe
atgtcccggcctcaattctactcag

SEQ ID NO: 1194 - DNA, 25 bp, Artificial Sequence
  Description of Artificial Sequence: Synthetic probe
gtaccttagggcaggaccacagaca

SEQ ID NO: 1195 - DNA, 25 bp, Artificial Sequence
  Description of Artificial Sequence: Synthetic probe
gttctaaaggcatgtgtgtgctcac

SEQ ID NO: 1196 - DNA, 25 bp, Artificial Sequence
  Description of Artificial Sequence: Synthetic probe
tgagagtcaggcaccgacctcatct

SEQ ID NO: 1197 - DNA, 25 bp, Artificial Sequence
  Description of Artificial Sequence: Synthetic probe
tcagcgccggcaaccacaggagtcg

SEQ ID NO: 1198 - DNA, 25 bp, Artificial Sequence
  Description of Artificial Sequence: Synthetic probe
actaggcgggcacactatcgttgtc

SEQ ID NO: 1199 - DNA, 25 bp, Artificial Sequence
  Description of Artificial Sequence: Synthetic probe
ttactccacggcacgggtacacaag

SEQ ID NO: 1200 - DNA, 25 bp, Artificial Sequence
  Description of Artificial Sequence: Synthetic probe
gtcttttggcacactcgggcaaacc

SEQ ID NO: 1201 - DNA, 25 bp, Artificial Sequence
  Description of Artificial Sequence: Synthetic probe
agagacaccggcacacacaacgtac

SEQ ID NO: 1202 - DNA, 25 bp, Artificial Sequence
  Description of Artificial Sequence: Synthetic probe
gtcggacgcaggcacagacgtagac

SEQ ID NO: 1203 - DNA, 25 bp, Artificial Sequence
  Description of Artificial Sequence: Synthetic probe
agtcactctggcacgcactttcgac

SEQ ID NO: 1204 - DNA, 25 bp, Artificial Sequence
  Description of Artificial Sequence: Synthetic probe
tcctcggacggcacaacagtgtcgc

SEQ ID NO: 1205 - DNA, 25 bp, Artificial Sequence
  Description of Artificial Sequence: Synthetic probe
tggtgtgtatgcctggttagcggca

SEQ ID NO: 1206 - DNA, 25 bp, Artificial Sequence
  Description of Artificial Sequence: Synthetic probe
ctaaaccggcacactccgagtcgga

SEQ ID NO: 1207 - DNA, 25 bp, Artificial Sequence
  Description of Artificial Sequence: Synthetic probe
cgacaccgacggcacgcacagataa

SEQ ID NO: 1208 - DNA, 25 bp, Artificial Sequence
  Description of Artificial Sequence: Synthetic probe
gactacgacagacggcacgctccag

SEQ ID NO: 1209 - DNA, 25 bp, Artificial Sequence
  Description of Artificial Sequence: Synthetic probe
cgtgggtgtgccgaaacctaaaaca

SEQ ID NO: 1210 - DNA, 25 bp, Artificial Sequence
  Description of Artificial Sequence: Synthetic probe
gacgtcgcctatgcctgccgatcac

SEQ ID NO: 1211 - DNA, 25 bp, Artificial Sequence
  Description of Artificial Sequence: Synthetic probe
cgccggctgccaccacatgactcgc

SEQ ID NO: 1212 - DNA, 25 bp, Artificial Sequence
  Description of Artificial Sequence: Synthetic probe
ctcctcctgcctgtgggactcgagg

SEQ ID NO: 1213 - DNA, 25 bp, Artificial Sequence
  Description of Artificial Sequence: Synthetic probe
ctattagagtgcctgtgtgtcattc

SEQ ID NO: 1214 - DNA, 25 bp, Artificial Sequence
  Description of Artificial Sequence: Synthetic probe
tgtgtgtggtgcctcttctaaacct

SEQ ID NO: 1215 - DNA, 25 bp, Artificial Sequence
  Description of Artificial Sequence: Synthetic probe
tggtgtgtctgccagtctctccagt

SEQ ID NO: 1216 - DNA, 25 bp, Artificial Sequence
  Description of Artificial Sequence: Synthetic probe
gagttactcgactgcctcctcgtgt

SEQ ID NO: 1217 - DNA, 25 bp, Artificial Sequence
  Description of Artificial Sequence: Synthetic probe
tgtcgtgtgtcgtgccactcagcgt

SEQ ID NO: 1218 - DNA, 25 bp, Artificial Sequence
  Description of Artificial Sequence: Synthetic probe
tcgtgcgtctcgtgccgctagacgc

SEQ ID NO: 1219 - DNA, 25 bp, Artificial Sequence
  Description of Artificial Sequence: Synthetic probe
actcgtgcgctgcagtgtttaatgg

SEQ ID NO: 1220 - DNA, 25 bp, Artificial Sequence
  Description of Artificial Sequence: Synthetic probe
aacggcgtgtgcagcgtgcaccaga

SEQ ID NO: 1221 - DNA, 25 bp, Artificial Sequence
  Description of Artificial Sequence: Synthetic probe
agatccttgcgacctcctggaaccg

SEQ ID NO: 1222 - DNA, 25 bp, Artificial Sequence
  Description of Artificial Sequence: Synthetic probe
gccgccgctgcacgtcacgtagtgg

SEQ ID NO: 1223 - DNA, 25 bp, Artificial Sequence
  Description of Artificial Sequence: Synthetic probe
ctggtgcgtgcatagagaactcttt

SEQ ID NO: 1224 - DNA, 25 bp, Artificial Sequence
  Description of Artificial Sequence: Synthetic probe
cctagtgtgtgcagtgacagaaagc

SEQ ID NO: 1225 - DNA, 25 bp, Artificial Sequence
  Description of Artificial Sequence: Synthetic probe
gtgtgtacgatgtgcacaaggaaaa

SEQ ID NO: 1226 - DNA, 25 bp, Artificial Sequence
  Description of Artificial Sequence: Synthetic probe
tcggtggtggctttcaagactcgtc

SEQ ID NO: 1227 - DNA, 25 bp, Artificial Sequence
  Description of Artificial Sequence: Synthetic probe
cttgtgtggctttctatccggactg

SEQ ID NO: 1228 - DNA, 25 bp, Artificial Sequence
  Description of Artificial Sequence: Synthetic probe
cagaagggctcacgccgccacgttg

SEQ ID NO: 1229 - DNA, 25 bp, Artificial Sequence
  Description of Artificial Sequence: Synthetic probe
cgtggtgcgtgctaccgacaaagaa

SEQ ID NO: 1230 - DNA, 25 bp, Artificial Sequence
  Description of Artificial Sequence: Synthetic probe
ctccaaggctcacgagacgcctgag

SEQ ID NO: 1231 - DNA, 25 bp, Artificial Sequence
  Description of Artificial Sequence: Synthetic probe
ccactacgggctaaagtacgggtcc

SEQ ID NO: 1232 - DNA, 25 bp, Artificial Sequence
  Description of Artificial Sequence: Synthetic probe
gcccatcgtgcttgtggtggcgtct

SEQ ID NO: 1233 - DNA, 25 bp, Artificial Sequence
  Description of Artificial Sequence: Synthetic probe
aatctacttgcgtgcgactgtgcat

SEQ ID NO: 1234 - DNA, 25 bp, Artificial Sequence
  Description of Artificial Sequence: Synthetic probe
actaccactactgcttccggggtcg

SEQ ID NO: 1235 - DNA, 25 bp, Artificial Sequence
  Description of Artificial Sequence: Synthetic probe
cgttcgtggtgcttgttcgactgta

SEQ ID NO: 1236 - DNA, 25 bp, Artificial Sequence
  Description of Artificial Sequence: Synthetic probe
atactgagtgtgctgtggtcatcag

SEQ ID NO: 1237 - DNA, 25 bp, Artificial Sequence
  Description of Artificial Sequence: Synthetic probe
cggtaaaagccctgaccaccacata

SEQ ID NO: 1238 - DNA, 25 bp, Artificial Sequence
  Description of Artificial Sequence: Synthetic probe
acttgtgtgtgctcgaggaaccacc

SEQ ID NO: 1239 - DNA, 25 bp, Artificial Sequence
  Description of Artificial Sequence: Synthetic probe
cttctacacgtgctagtcgagcgac

SEQ ID NO: 1240 - DNA, 25 bp, Artificial Sequence
  Description of Artificial Sequence: Synthetic probe
gcctgccagcctcttccgtcatcca

SEQ ID NO: 1241 - DNA, 25 bp, Artificial Sequence
  Description of Artificial Sequence: Synthetic probe
tgcgcgccagcccgccggcgccggc

SEQ ID NO: 1242 - DNA, 25 bp, Artificial Sequence
  Description of Artificial Sequence: Synthetic probe
ggccgccagccagccgtgcacgggc

SEQ ID NO: 1243 - DNA, 25 bp, Artificial Sequence
  Description of Artificial Sequence: Synthetic probe
cgcgccgcagccgagctctccgccg

SEQ ID NO: 1244 - DNA, 25 bp, Artificial Sequence
  Description of Artificial Sequence: Synthetic probe
cgcaccgcagccgcgcgccgaggcc

SEQ ID NO: 1245 - DNA, 25 bp, Artificial Sequence
  Description of Artificial Sequence: Synthetic probe
cccgcgcagccgccattgaggactt

SEQ ID NO: 1246 - DNA, 25 bp, Artificial Sequence
  Description of Artificial Sequence: Synthetic probe
tagtgtgtgtcagcagattctgtgc

SEQ ID NO: 1247 - DNA, 25 bp, Artificial Sequence
  Description of Artificial Sequence: Synthetic probe
cgtaacgaaagcacatttaatacat

SEQ ID NO: 1248 - DNA, 25 bp, Artificial Sequence
  Description of Artificial Sequence: Synthetic probe
accgaccacgagcatagatgttttt

SEQ ID NO: 1249 - DNA, 25 bp, Artificial Sequence
  Description of Artificial Sequence: Synthetic probe
ggtcgacacgacagcatgagtatgt

SEQ ID NO: 1250 - DNA, 25 bp, Artificial Sequence
  Description of Artificial Sequence: Synthetic probe
acttcttcagcacgccacgaggtgt

SEQ ID NO: 1251 - DNA, 25 bp, Artificial Sequence
  Description of Artificial Sequence: Synthetic probe
ctcccgcagcacgaacacgaagtcg

SEQ ID NO: 1252 - DNA, 25 bp, Artificial Sequence
  Description of Artificial Sequence: Synthetic probe
ctacctacctagcatgtggaacgga

SEQ ID NO: 1253 - DNA, 25 bp, Artificial Sequence
  Description of Artificial Sequence: Synthetic probe
agatccgtagagcacactcgcctga

SEQ ID NO: 1254 - DNA, 25 bp, Artificial Sequence
  Description of Artificial Sequence: Synthetic probe
gccgtccacgagcaggagtctcttc

SEQ ID NO: 1255 - DNA, 25 bp, Artificial Sequence
  Description of Artificial Sequence: Synthetic probe
tcctacgcgacgagcagccggacta

SEQ ID NO: 1256 - DNA, 25 bp, Artificial Sequence
  Description of Artificial Sequence: Synthetic probe
gtcgcacgcatagccttgccgacgc

SEQ ID NO: 1257 - DNA, 25 bp, Artificial Sequence
  Description of Artificial Sequence: Synthetic probe
ggtcgcgactcagctccaactgtcc

SEQ ID NO: 1258 - DNA, 25 bp, Artificial Sequence
  Description of Artificial Sequence: Synthetic probe
ctaccctaagcttgtgcgttcgtgt

SEQ ID NO: 1259 - DNA, 25 bp, Artificial Sequence
  Description of Artificial Sequence: Synthetic probe
ccgccgccgcggaaaggttataccg

SEQ ID NO: 1260 - DNA, 25 bp, Artificial Sequence
  Description of Artificial Sequence: Synthetic probe
agacataagagctcggtagacgaca

SEQ ID NO: 1261 - DNA, 25 bp, Artificial Sequence
  Description of Artificial Sequence: Synthetic probe
gcggggtgtgcggccggaaaagacg

SEQ ID NO: 1262 - DNA, 25 bp, Artificial Sequence
  Description of Artificial Sequence: Synthetic probe
cgaccgaagagctctttataagccg

SEQ ID NO: 1263 - DNA, 25 bp, Artificial Sequence
  Description of Artificial Sequence: Synthetic probe
cttcggggcggtgttacagtacact

SEQ ID NO: 1264 - DNA, 25 bp, Artificial Sequence
  Description of Artificial Sequence: Synthetic probe
cgcagtgttgcgtgcatgaggctca

SEQ ID NO: 1265 - DNA, 25 bp, Artificial Sequence
  Description of Artificial Sequence: Synthetic probe
aaactttgcggtgtgtcggctccgc

SEQ ID NO: 1266 - DNA, 25 bp, Artificial Sequence
  Description of Artificial Sequence: Synthetic probe
gcaagttaggcgacccgacgacacc

SEQ ID NO: 1267 - DNA, 25 bp, Artificial Sequence
  Description of Artificial Sequence: Synthetic probe
ttcaccaggcgacaccgaagagagg

SEQ ID NO: 1268 - DNA, 25 bp, Artificial Sequence
  Description of Artificial Sequence: Synthetic probe
agccagtggcgacaccgacgccagt

SEQ ID NO: 1269 - DNA, 25 bp, Artificial Sequence
  Description of Artificial Sequence: Synthetic probe
tcgaagcggtgcgtgtgccgatccc

SEQ ID NO: 1270 - DNA, 25 bp, Artificial Sequence
  Description of Artificial Sequence: Synthetic probe
gggacatgtgcggtggttttactac

SEQ ID NO: 1271 - skipped

SEQ ID NO: 1272 - DNA, 25 bp, Artificial Sequence
  Description of Artificial Sequence: Synthetic probe
cctgtggtgcgctgcggcagccctg

SEQ ID NO: 1273 - DNA, 25 bp, Artificial Sequence
  Description of Artificial Sequence: Synthetic probe
tccgacgacactgcgcgttgagatc

SEQ ID NO: 1274 - DNA, 25 bp, Artificial Sequence
  Description of Artificial Sequence: Synthetic probe
gttcgtgtaactgcgaggactgata

SEQ ID NO: 1275 - DNA, 25 bp, Artificial Sequence
  Description of Artificial Sequence: Synthetic probe
acgtccagggcgtcacggacaagag

SEQ ID NO: 1276 - DNA, 25 bp, Artificial Sequence
  Description of Artificial Sequence: Synthetic probe
ctcccgtggcgtgtggtacgtccca

SEQ ID NO: 1277 - DNA, 25 bp, Artificial Sequence
  Description of Artificial Sequence: Synthetic probe
ctgtcttgtgcgtgtaaagagacgc

SEQ ID NO: 1278 - DNA, 25 bp, Artificial Sequence
  Description of Artificial Sequence: Synthetic probe
acctgttctgcgtgccgtgtctgta

SEQ ID NO: 1279 - DNA, 25 bp, Artificial Sequence
  Description of Artificial Sequence: Synthetic probe
cggtcgtggtgcgtgctaccgacaa

SEQ ID NO: 1280 - DNA, 25 bp, Artificial Sequence
  Description of Artificial Sequence: Synthetic probe
ccgcggcgtgcgtacctgacacaag

SEQ ID NO: 1281 - DNA, 25 bp, Artificial Sequence
  Description of Artificial Sequence: Synthetic probe
atccactactgcgtcgagaacccgg

SEQ ID NO: 1282 - DNA, 25 bp, Artificial Sequence
  Description of Artificial Sequence: Synthetic probe
cgacaggtgtgcgtctacatgggct

SEQ ID NO: 1283 - DNA, 25 bp, Artificial Sequence
  Description of Artificial Sequence: Synthetic probe
ctcgtggatgcgtggtctgtaaaat

SEQ ID NO: 1284 - DNA, 25 bp, Artificial Sequence
  Description of Artificial Sequence: Synthetic probe
cgactaaggtgcgtaccgtgctttt

SEQ ID NO: 1285 - DNA, 25 bp, Artificial Sequence
  Description of Artificial Sequence: Synthetic probe
tcgctgaggtgcgtgagttccatca

SEQ ID NO: 1286 - DNA, 25 bp, Artificial Sequence
  Description of Artificial Sequence: Synthetic probe
ccttgtgtgcgtgtcaaagacggac

SEQ ID NO: 1287 - DNA, 25 bp, Artificial Sequence
  Description of Artificial Sequence: Synthetic probe
ccctcggtgcgtgtgttacgcgcac

SEQ ID NO: 1288 - DNA, 25 bp, Artificial Sequence
  Description of Artificial Sequence: Synthetic probe
ggttccgctgcgtgccgtgcattta

SEQ ID NO: 1289 - DNA, 25 bp, Artificial Sequence
  Description of Artificial Sequence: Synthetic probe
accgcgcgtcgtgcgtaagctacta

SEQ ID NO: 1290 - DNA, 25 bp, Artificial Sequence
  Description of Artificial Sequence: Synthetic probe
cttttgtgcgtcctgttgtgactac

SEQ ID NO: 1291 - DNA, 25 bp, Artificial Sequence
  Description of Artificial Sequence: Synthetic probe
atgtacgagtgtgcgtatccgacac

SEQ ID NO: 1292 - DNA, 25 bp, Artificial Sequence
  Description of Artificial Sequence: Synthetic probe
aacttcggtgcgtgaggacttcttg

SEQ ID NO: 1293 - DNA, 25 bp, Artificial Sequence
  Description of Artificial Sequence: Synthetic probe
gcttctactacgtgcgtgtcctcca

SEQ ID NO: 1294 - DNA, 25 bp, Artificial Sequence
  Description of Artificial Sequence: Synthetic probe
tgtagactgtgtgcgtacacttgcg

SEQ ID NO: 1295 - DNA, 25 bp, Artificial Sequence
  Description of Artificial Sequence: Synthetic probe
tattgtgtgagcgtagaaggtaccg

SEQ ID NO: 1296 - DNA, 25 bp, Artificial Sequence
  Description of Artificial Sequence: Synthetic probe
agagttttagcgtagtgtgcgtcgt

SEQ ID NO: 1297 - DNA, 25 bp, Artificial Sequence
  Description of Artificial Sequence: Synthetic probe
cgcacgtccagcgtagctacagcca

SEQ ID NO: 1298 - DNA, 25 bp, Artificial Sequence
  Description of Artificial Sequence: Synthetic probe
aggaaccagcgtgtgtggaactgtc

SEQ ID NO: 1299 - DNA, 25 bp, Artificial Sequence
  Description of Artificial Sequence: Synthetic probe
cacgtcgcagcgcccattgggggtc

SEQ ID NO: 1300 - DNA, 25 bp, Artificial Sequence
  Description of Artificial Sequence: Synthetic probe
cgcctgccgccgggccgccagcccg

SEQ ID NO: 1301 - DNA, 25 bp, Artificial Sequence
  Description of Artificial Sequence: Synthetic probe
acgcccgccgcggtctttgacgttt

SEQ ID NO: 1302 - DNA, 25 bp, Artificial Sequence
  Description of Artificial Sequence: Synthetic probe
tcgtgtcggtgagcgtcgaactccc

SEQ ID NO: 1303 - DNA, 25 bp, Artificial Sequence
  Description of Artificial Sequence: Synthetic probe
aaatcccgccgctaacttaacgtgg

SEQ ID NO: 1304 - DNA, 25 bp, Artificial Sequence
  Description of Artificial Sequence: Synthetic probe
aagtcatccgccgtttccgccggct

SEQ ID NO: 1305 - DNA, 25 bp, Artificial Sequence
  Description of Artificial Sequence: Synthetic probe
cgcccgcgcgccgccggctgcgccc

SEQ ID NO: 1306 - DNA, 25 bp, Artificial Sequence
  Description of Artificial Sequence: Synthetic probe
ggaggcgccgcccgccagctcgccc

SEQ ID NO: 1307 - skipped

SEQ ID NO: 1308 - DNA, 25 bp, Artificial Sequence
  Description of Artificial Sequence: Synthetic probe
agtttcgccgccgactccagtttct

SEQ ID NO: 1309 - DNA, 25 bp, Artificial Sequence
  Description of Artificial Sequence: Synthetic probe
tccgcgcgccgcaccataggggttt

SEQ ID NO: 1310 - DNA, 25 bp, Artificial Sequence
  Description of Artificial Sequence: Synthetic probe
ttccgccgcgccttagggaagaagt

SEQ ID NO: 1311 - DNA, 25 bp, Artificial Sequence
  Description of Artificial Sequence: Synthetic probe
cccgcgccgcccgtcacgccttcgg

SEQ ID NO: 1312 - DNA, 25 bp, Artificial Sequence
  Description of Artificial Sequence: Synthetic probe
cgccggccgccagccgggggactcg

SEQ ID NO: 1313 - DNA, 25 bp, Artificial Sequence
  Description of Artificial Sequence: Synthetic probe
acgtttcgccgccacccaacagggt

SEQ ID NO: 1314 - DNA, 25 bp, Artificial Sequence
  Description of Artificial Sequence: Synthetic probe
agccacgccgccatggtaaaagaag

SEQ ID NO: 1315 - DNA, 25 bp, Artificial Sequence
  Description of Artificial Sequence: Synthetic probe
tgttccgccgcagtccgcaaggagt

SEQ ID NO: 1316 - DNA, 25 bp, Artificial Sequence
  Description of Artificial Sequence: Synthetic probe
gtgctggaccgccaccagaaggtga

SEQ ID NO: 1317 - DNA, 25 bp, Artificial Sequence
  Description of Artificial Sequence: Synthetic probe
acaccggccgccgtcttaagtagga

SEQ ID NO: 1318 - DNA, 25 bp, Artificial Sequence
  Description of Artificial Sequence: Synthetic probe
cagggccgccgtcagcacgatggac

SEQ ID NO: 1319 - DNA, 25 bp, Artificial Sequence
  Description of Artificial Sequence: Synthetic probe
ttagccgccgccataaagagactgc

SEQ ID NO: 1320 - DNA, 25 bp, Artificial Sequence
  Description of Artificial Sequence: Synthetic probe
gttccatccgccgtatctcgacgag

SEQ ID NO: 1321 - DNA, 25 bp, Artificial Sequence
  Description of Artificial Sequence: Synthetic probe
cctgagccgccgcaggacaacggtt

SEQ ID NO: 1322 - DNA, 25 bp, Artificial Sequence
  Description of Artificial Sequence: Synthetic probe
cctcccgcgccacaccagtaaaatt

SEQ ID NO: 1323 - DNA, 25 bp, Artificial Sequence
  Description of Artificial Sequence: Synthetic probe
cgaccaaccgcaaccacagaaattt

SEQ ID NO: 1324 - DNA, 25 bp, Artificial Sequence
  Description of Artificial Sequence: Synthetic probe
ttctttccgccgacgaacttcctgt

SEQ ID NO: 1325 - DNA, 25 bp, Artificial Sequence
  Description of Artificial Sequence: Synthetic probe
atcctctaccgcatacatttagggg

SEQ ID NO: 1326 - DNA, 25 bp, Artificial Sequence
  Description of Artificial Sequence: Synthetic probe
agccgccgcgccagcgccggccccc

SEQ ID NO: 1327 - DNA, 25 bp, Artificial Sequence
  Description of Artificial Sequence: Synthetic probe
ctcgtccaccgccacggtagaggtg

SEQ ID NO: 1328 - DNA, 25 bp, Artificial Sequence
  Description of Artificial Sequence: Synthetic probe
aggtccgccgcaaagtccaagagtc

SEQ ID NO: 1329 - DNA, 25 bp, Artificial Sequence
  Description of Artificial Sequence: Synthetic probe
ggtcgtccgccgcagactcggtcat

SEQ ID NO: 1330 - DNA, 25 bp, Artificial Sequence
  Description of Artificial Sequence: Synthetic probe
cccgccgcgcaatgctccctgtgtc

SEQ ID NO: 1331 - DNA, 25 bp, Artificial Sequence
  Description of Artificial Sequence: Synthetic probe
tgtatcagccgcacgcacaccttgg

SEQ ID NO: 1332 - DNA, 25 bp, Artificial Sequence
  Description of Artificial Sequence: Synthetic probe
tcatgtcccgcaccgacgacaacca

SEQ ID NO: 1333 - DNA, 25 bp, Artificial Sequence
  Description of Artificial Sequence: Synthetic probe
gaaagaatcgccgaccgacgagccg

SEQ ID NO: 1334 - DNA, 25 bp, Artificial Sequence
  Description of Artificial Sequence: Synthetic probe
agacagtacgccgcagcttcgcctg

SEQ ID NO: 1335 - DNA, 25 bp, Artificial Sequence
  Description of Artificial Sequence: Synthetic probe
tcgcccgccgcatgccggaccccgg

SEQ ID NO: 1336 - DNA, 25 bp, Artificial Sequence
  Description of Artificial Sequence: Synthetic probe
gcgcccgccgcagccggccggcccg

SEQ ID NO: 1337 - DNA, 25 bp, Artificial Sequence
  Description of Artificial Sequence: Synthetic probe
ggtcaccaccgcagctccttataat

SEQ ID NO: 1338 - DNA, 25 bp, Artificial Sequence
  Description of Artificial Sequence: Synthetic probe
tgtcacactccgcacacgtggtgac

SEQ ID NO: 1339 - DNA, 25 bp, Artificial Sequence
  Description of Artificial Sequence: Synthetic probe
tttcacactcgcacacatcgggagc

SEQ ID NO: 1340 - DNA, 25 bp, Artificial Sequence
  Description of Artificial Sequence: Synthetic probe
acacagagccgcaccaaaggacgag

SEQ ID NO: 1341 - DNA, 25 bp, Artificial Sequence
  Description of Artificial Sequence: Synthetic probe
gtgtcacactccgcacacgtggtga

SEQ ID NO: 1342 - DNA, 25 bp, Artificial Sequence
  Description of Artificial Sequence: Synthetic probe
ctatcgtcccgcactccttgaagtg

SEQ ID NO: 1343 - DNA, 25 bp, Artificial Sequence
  Description of Artificial Sequence: Synthetic probe
cggcgtgtgcgcatatgacatatgt

SEQ ID NO: 1344 - DNA, 25 bp, Artificial Sequence
  Description of Artificial Sequence: Synthetic probe
cgtcagcctcgccaacaccaggggc

SEQ ID NO: 1345 - DNA, 25 bp, Artificial Sequence
  Description of Artificial Sequence: Synthetic probe
gcgtccgccgcgcacccgcgccgcg

SEQ ID NO: 1346 - DNA, 25 bp, Artificial Sequence
  Description of Artificial Sequence: Synthetic probe
gacccgcggcgcaccgccgccgcgc

SEQ ID NO: 1347 - DNA, 25 bp, Artificial Sequence
  Description of Artificial Sequence: Synthetic probe
ctctccgtctcgcacaagttgagtc

SEQ ID NO: 1348 - DNA, 25 bp, Artificial Sequence
  Description of Artificial Sequence: Synthetic probe
acacccggcgcacatcattttagac

SEQ ID NO: 1349 - DNA, 25 bp, Artificial Sequence
  Description of Artificial Sequence: Synthetic probe
atcgtccgctcgcaccgatgaggat

SEQ ID NO: 1350 - DNA, 25 bp, Artificial Sequence
  Description of Artificial Sequence: Synthetic probe
ctgtgcgtgcgcaagaagaacctac

SEQ ID NO: 1351 - DNA, 25 bp, Artificial Sequence
  Description of Artificial Sequence: Synthetic probe
gcgcggcctcgcacacacacacatg

SEQ ID NO: 1352 - DNA, 25 bp, Artificial Sequence
  Description of Artificial Sequence: Synthetic probe
ctttcactcgcacacgcgacgtcct

SEQ ID NO: 1353 - DNA, 25 bp, Artificial Sequence
  Description of Artificial Sequence: Synthetic probe
aaccggctcgcacccacagagggga

SEQ ID NO: 1354 - DNA, 25 bp, Artificial Sequence
  Description of Artificial Sequence: Synthetic probe
gccgccagcgctgcccgcagccggc

SEQ ID NO: 1355 - DNA, 25 bp, Artificial Sequence
  Description of Artificial Sequence: Synthetic probe
ctactccacgcgctgctgcaagagt

SEQ ID NO: 1356 - DNA, 25 bp, Artificial Sequence
  Description of Artificial Sequence: Synthetic probe
cggccgccgctcctgaagaaacaga

SEQ ID NO: 1357 - DNA, 25 bp, Artificial Sequence
  Description of Artificial Sequence: Synthetic probe
cacacacgtactcgcacctgggcct

SEQ ID NO: 1358 - DNA, 25 bp, Artificial Sequence
  Description of Artificial Sequence: Synthetic probe
gaccactgccgctacttgccatgta

SEQ ID NO: 1359 - DNA, 25 bp, Artificial Sequence
  Description of Artificial Sequence: Synthetic probe
agaactacgccgctcaccgacggaa

SEQ ID NO: 1360 - DNA, 25 bp, Artificial Sequence
  Description of Artificial Sequence: Synthetic probe
ccatttcgctaggtgtgtggaccca

SEQ ID NO: 1361 - DNA, 25 bp, Artificial Sequence
  Description of Artificial Sequence: Synthetic probe
aatatatatcgctggtgttggcggg

SEQ ID NO: 1362 - DNA, 25 bp, Artificial Sequence
  Description of Artificial Sequence: Synthetic probe
catgttaacgcaccatacacggagg

SEQ ID NO: 1363 - DNA, 25 bp, Artificial Sequence
  Description of Artificial Sequence: Synthetic probe
cacacacacacgcaggaggagagag

SEQ ID NO: 1364 - DNA, 25 bp, Artificial Sequence
  Description of Artificial Sequence: Synthetic probe
agatcccgacgcctgatattagggt

SEQ ID NO: 1365 - DNA, 25 bp, Artificial Sequence
  Description of Artificial Sequence: Synthetic probe
atcagccacgcaccactggacatgg

SEQ ID NO: 1366 - DNA, 25 bp, Artificial Sequence
  Description of Artificial Sequence: Synthetic probe
tctacattcacgcacacactctaaa

SEQ ID NO: 1367 - DNA, 25 bp, Artificial Sequence
  Description of Artificial Sequence: Synthetic probe
ttggcatacgcacacgaagacacgc

SEQ ID NO: 1368 - DNA, 25 bp, Artificial Sequence
  Description of Artificial Sequence: Synthetic probe
gacgccgcgcacgccagggccgccc

SEQ ID NO: 1369 - DNA, 25 bp, Artificial Sequence
  Description of Artificial Sequence: Synthetic probe
ggagtctacgacacgcaaccggctt

SEQ ID NO: 1370 - DNA, 25 bp, Artificial Sequence
  Description of Artificial Sequence: Synthetic probe
ctgttcacacgccacacgggaaact

SEQ ID NO: 1371 - DNA, 25 bp, Artificial Sequence
  Description of Artificial Sequence: Synthetic probe
attattcacgcacacacttctaaga

SEQ ID NO: 1372 - DNA, 25 bp, Artificial Sequence
  Description of Artificial Sequence: Synthetic probe
gtggggacacgcacctacgagttca

SEQ ID NO: 1373 - DNA, 25 bp, Artificial Sequence
  Description of Artificial Sequence: Synthetic probe
aggttgcacgcaccgaccgtgaccg

SEQ ID NO: 1374 - DNA, 25 bp, Artificial Sequence
  Description of Artificial Sequence: Synthetic probe
aggtcccgacgcaggccgacgacgt

SEQ ID NO: 1375 - DNA, 25 bp, Artificial Sequence
  Description of Artificial Sequence: Synthetic probe
gtagcgactgcacgcacactacgtc

SEQ ID NO: 1376 - DNA, 25 bp, Artificial Sequence
  Description of Artificial Sequence: Synthetic probe
aggttctcacgcacaccaggtactc

SEQ ID NO: 1377 - DNA, 25 bp, Artificial Sequence
  Description of Artificial Sequence: Synthetic probe
gtgcacacgtacacgcagacattcg

SEQ ID NO: 1378 - DNA, 25 bp, Artificial Sequence
  Description of Artificial Sequence: Synthetic probe
atcaaccacgcgcacgggaccaggg

SEQ ID NO: 1379 - DNA, 25 bp, Artificial Sequence
  Description of Artificial Sequence: Synthetic probe
cacgaccaccgcgccgtcctgggag

SEQ ID NO: 1380 - DNA, 25 bp, Artificial Sequence
  Description of Artificial Sequence: Synthetic probe
ctgaccctacgcagggaatctgacc

SEQ ID NO: 1381 - DNA, 25 bp, Artificial Sequence
  Description of Artificial Sequence: Synthetic probe
ggtggctgaaccgacctactgccga

SEQ ID NO: 1382 - DNA, 25 bp, Artificial Sequence
  Description of Artificial Sequence: Synthetic probe
ccacagaccgcgaggactgtagtac

SEQ ID NO: 1383 - DNA, 25 bp, Artificial Sequence
  Description of Artificial Sequence: Synthetic probe
tccccgccgcgctacgtctccgccg

SEQ ID NO: 1384 - DNA, 25 bp, Artificial Sequence
  Description of Artificial Sequence: Synthetic probe
gtcgccgcccgcgcggtggcccccg

SEQ ID NO: 1385 - DNA, 25 bp, Artificial Sequence
  Description of Artificial Sequence: Synthetic probe
cggccgccgcgccagcggggccgcg

SEQ ID NO: 1386 - DNA, 25 bp, Artificial Sequence
  Description of Artificial Sequence: Synthetic probe
agcgggtgcgcgtgatacagctaca

SEQ ID NO: 1387 - DNA, 25 bp, Artificial Sequence
  Description of Artificial Sequence: Synthetic probe
acctcccgtcgcgtccgagtaacaa

SEQ ID NO: 1388 - DNA, 25 bp, Artificial Sequence
  Description of Artificial Sequence: Synthetic probe
tgcgccgccgcgtaaacataggcac

SEQ ID NO: 1389 - DNA, 25 bp, Artificial Sequence
  Description of Artificial Sequence: Synthetic probe
cacgccaacgcgccagcccgcgcgg

SEQ ID NO: 1390 - DNA, 25 bp, Artificial Sequence
  Description of Artificial Sequence: Synthetic probe
cgcacagaccgcgacgcaaacgtga

SEQ ID NO: 1391 - DNA, 25 bp, Artificial Sequence
  Description of Artificial Sequence: Synthetic probe
ttgacgcaccgcgacgactacctgt

SEQ ID NO: 1392 - DNA, 25 bp, Artificial Sequence
  Description of Artificial Sequence: Synthetic probe
tcctacagccgcgtgtcgaccgaag

SEQ ID NO: 1393 - DNA, 25 bp, Artificial Sequence
  Description of Artificial Sequence: Synthetic probe
acacgttcagtaaatgggggtcgat

SEQ ID NO: 1394 - DNA, 25 bp, Artificial Sequence
  Description of Artificial Sequence: Synthetic probe
agacacacacgtacgcggaaccctg

SEQ ID NO: 1395 - DNA, 25 bp, Artificial Sequence
  Description of Artificial Sequence: Synthetic probe
ggacccaacgcgcacgcactgaagg

SEQ ID NO: 1396 - skipped

SEQ ID NO: 1397 - DNA, 25 bp, Artificial Sequence
  Description of Artificial Sequence: Synthetic probe
agttgcgaaaatgtgagtgtgtgtc

SEQ ID NO: 1398 - DNA, 25 bp, Artificial Sequence
  Description of Artificial Sequence: Synthetic probe
gaaacacaaaaggtagtcccggagt

SEQ ID NO: 1399 - DNA, 25 bp, Artificial Sequence
  Description of Artificial Sequence: Synthetic probe
atctacctcaaatggtgggcgaaac

SEQ ID NO: 1400 - DNA, 25 bp, Artificial Sequence
  Description of Artificial Sequence: Synthetic probe
acatcctacaaatgtgtgtgatgtc

SEQ ID NO: 1401 - DNA, 25 bp, Artificial Sequence
  Description of Artificial Sequence: Synthetic probe
gtaaaaccaagagtcccaaacaata

SEQ ID NO: 1402 - DNA, 25 bp, Artificial Sequence
  Description of Artificial Sequence: Synthetic probe
gaagagtccaaagcgccgaccacgt

SEQ ID NO: 1403 - DNA, 25 bp, Artificial Sequence
  Description of Artificial Sequence: Synthetic probe
tcgtgcgtgacaaagcccaagccct

SEQ ID NO: 1404 - DNA, 25 bp, Artificial Sequence
  Description of Artificial Sequence: Synthetic probe
agatccgcaaagtgtgcgtcgtcgc

SEQ ID NO: 1405 - DNA, 25 bp, Artificial Sequence
  Description of Artificial Sequence: Synthetic probe
acacaccaaaacagacacacacgta

SEQ ID NO: 1406 - DNA, 25 bp, Artificial Sequence
  Description of Artificial Sequence: Synthetic probe
ggtgtgtgtgaaaacattaacttta

SEQ ID NO: 1407 - DNA, 25 bp, Artificial Sequence
  Description of Artificial Sequence: Synthetic probe
cggaaagaaagacctcagccgtctg

SEQ ID NO: 1408 - DNA, 25 bp, Artificial Sequence
  Description of Artificial Sequence: Synthetic probe
gtctccgccgaaataatcttgatct

SEQ ID NO: 1409 - DNA, 25 bp, Artificial Sequence
  Description of Artificial Sequence: Synthetic probe
ctccactcgaaagtgaacgacaggt

SEQ ID NO: 1410 - DNA, 25 bp, Artificial Sequence
  Description of Artificial Sequence: Synthetic probe
ttcaccggaaacaacactaaagagg

SEQ ID NO: 1411 - DNA, 25 bp, Artificial Sequence
  Description of Artificial Sequence: Synthetic probe
accgacccgaaactcctagttagtg

SEQ ID NO: 1412 - DNA, 25 bp, Artificial Sequence
  Description of Artificial Sequence: Synthetic probe
ctgagaggaaactaccaccactatc

SEQ ID NO: 1413 - DNA, 25 bp, Artificial Sequence
  Description of Artificial Sequence: Synthetic probe
cgacccgacgaaagtagtgcgcatt

SEQ ID NO: 1414 - skipped

SEQ ID NO: 1415 - DNA, 25 bp, Artificial Sequence
  Description of Artificial Sequence: Synthetic probe
attttgaaacacgacaccgacttcc

SEQ ID NO: 1416 - DNA, 25 bp, Artificial Sequence
  Description of Artificial Sequence: Synthetic probe
gttaccgaggaaacgacgcacacct

SEQ ID NO: 1417 - DNA, 25 bp, Artificial Sequence
  Description of Artificial Sequence: Synthetic probe
cctactttaaagattagtgtgtgtg

SEQ ID NO: 1418 - DNA, 25 bp, Artificial Sequence
  Description of Artificial Sequence: Synthetic probe
cctgtcataaatagtgtgtgtcctg

SEQ ID NO: 1419 - DNA, 25 bp, Artificial Sequence
  Description of Artificial Sequence: Synthetic probe
cgttgtgtgtaaaggatctcccgtt

SEQ ID NO: 1420 - DNA, 25 bp, Artificial Sequence
  Description of Artificial Sequence: Synthetic probe
ctttgtagtaaatccacgggtcgtt

SEQ ID NO: 1421 - DNA, 25 bp, Artificial Sequence
  Description of Artificial Sequence: Synthetic probe
ttaacgaaaattacgtgtgtgtttg

SEQ ID NO: 1422 - DNA, 25 bp, Artificial Sequence
  Description of Artificial Sequence: Synthetic probe
tgggataaattgtgttgtgggtaat

SEQ ID NO: 1423 - DNA, 25 bp, Artificial Sequence
  Description of Artificial Sequence: Synthetic probe
atcctacaaatgtgtgtgatgtcgt

SEQ ID NO: 1424 - DNA, 25 bp, Artificial Sequence
  Description of Artificial Sequence: Synthetic probe
cagcacaaatctgtgtgtagggtgt

SEQ ID NO: 1425 - DNA, 25 bp, Artificial Sequence
  Description of Artificial Sequence: Synthetic probe
tgtgtgtggaatgtgtgtgcataat

SEQ ID NO: 1426 - skipped

SEQ ID NO: 1427 - DNA, 25 bp, Artificial Sequence
  Description of Artificial Sequence: Synthetic probe
agaagaacgaatgaatatgggtcgg

SEQ ID NO: 1428 - DNA, 25 bp, Artificial Sequence
  Description of Artificial Sequence: Synthetic probe
gggaacgacgaatgccgcgaccgtc

SEQ ID NO: 1429 - DNA, 25 bp, Artificial Sequence
  Description of Artificial Sequence: Synthetic probe
tcttgacctaattagtgtaaggaac

SEQ ID NO: 1430 - DNA, 25 bp, Artificial Sequence
  Description of Artificial Sequence: Synthetic probe
ggtgtgtgtataatgagtatcaaat

SEQ ID NO: 1431 - DNA, 25 bp, Artificial Sequence
  Description of Artificial Sequence: Synthetic probe
gtccgtcccgtaattaaagtagaag

SEQ ID NO: 1432 - DNA, 25 bp, Artificial Sequence
  Description of Artificial Sequence: Synthetic probe
gtggtggtgtaatcgaatctatacc

SEQ ID NO: 1433 - DNA, 25 bp, Artificial Sequence
  Description of Artificial Sequence: Synthetic probe
atttctcaaggagggatcaggacct

SEQ ID NO: 1434 - DNA, 25 bp, Artificial Sequence
  Description of Artificial Sequence: Synthetic probe
gtcccgagaaagcaacaacctgatg

SEQ ID NO: 1435 - DNA, 25 bp, Artificial Sequence
  Description of Artificial Sequence: Synthetic probe
acaccgacgcgaaggctacggccaa

SEQ ID NO: 1436 - DNA, 25 bp, Artificial Sequence
  Description of Artificial Sequence: Synthetic probe
accctgcgaaggtgaactacggtat

SEQ ID NO: 1437 - DNA, 25 bp, Artificial Sequence
  Description of Artificial Sequence: Synthetic probe
gcgactactacgacgaagaatttgg

SEQ ID NO: 1438 - DNA, 25 bp, Artificial Sequence
  Description of Artificial Sequence: Synthetic probe
ccgactaccgtaaggtcatgaccca

SEQ ID NO: 1439 - DNA, 25 bp, Artificial Sequence
  Description of Artificial Sequence: Synthetic probe
acaacgacgaaagtgaccggggcat

SEQ ID NO: 1440 - DNA, 25 bp, Artificial Sequence
  Description of Artificial Sequence: Synthetic probe
tcggcgtgaaagtcgcgtgcgtcct

SEQ ID NO: 1441 - DNA, 25 bp, Artificial Sequence
  Description of Artificial Sequence: Synthetic probe
aaaaccaagtcgcacacacacacat

SEQ ID NO: 1442 - DNA, 25 bp, Artificial Sequence
  Description of Artificial Sequence: Synthetic probe
gtggaagaaagtacacacgcacacc

SEQ ID NO: 1443 - DNA, 25 bp, Artificial Sequence
  Description of Artificial Sequence: Synthetic probe
actcatcaaagtaggtgtgtgtctg

SEQ ID NO: 1444 - DNA, 25 bp, Artificial Sequence
  Description of Artificial Sequence: Synthetic probe
gtctgatttaagtgtgcgtggtccc

SEQ ID NO: 1445 - DNA, 25 bp, Artificial Sequence
  Description of Artificial Sequence: Synthetic probe
accaaactaagtgcgtgtgtaaata

SEQ ID NO: 1446 - DNA, 25 bp, Artificial Sequence
  Description of Artificial Sequence: Synthetic probe
atacgcacgccaatggtgccgttgt

SEQ ID NO: 1447 - DNA, 25 bp, Artificial Sequence
  Description of Artificial Sequence: Synthetic probe
acaactcacacaactcacaccacag

SEQ ID NO: 1448 - DNA, 25 bp, Artificial Sequence
  Description of Artificial Sequence: Synthetic probe
ggaattaccaaccaaccaagatgat

SEQ ID NO: 1449 - DNA, 25 bp, Artificial Sequence
  Description of Artificial Sequence: Synthetic probe
gtgcgccgccaacacctagagtaat

SEQ ID NO: 1450 - DNA, 25 bp, Artificial Sequence
  Description of Artificial Sequence: Synthetic probe
accacagccaacgaggtcatggttg

SEQ ID NO: 1451 - DNA, 25 bp, Artificial Sequence
  Description of Artificial Sequence: Synthetic probe
tccagagaccacatgccaccgtgtg

SEQ ID NO: 1452 - DNA, 25 bp, Artificial Sequence
  Description of Artificial Sequence: Synthetic probe
gtccgtcgtcccaaccgataaattt

SEQ ID NO: 1453 - DNA, 25 bp, Artificial Sequence
  Description of Artificial Sequence: Synthetic probe
ctacataggcaaccggctcaaccgt

SEQ ID NO: 1454 - DNA, 25 bp, Artificial Sequence
  Description of Artificial Sequence: Synthetic probe
acaatttcaagtggtgtgtgtcacc

SEQ ID NO: 1455 - DNA, 25 bp, Artificial Sequence
  Description of Artificial Sequence: Synthetic probe
agaccagactcaacctcaccaggag

SEQ ID NO: 1456 - DNA, 25 bp, Artificial Sequence
  Description of Artificial Sequence: Synthetic probe
ccatacatacaactcacaccacaca

SEQ ID NO: 1457 - DNA, 25 bp, Artificial Sequence
  Description of Artificial Sequence: Synthetic probe
cgaccacgactcaacggacgaggga

SEQ ID NO: 1458 - DNA, 25 bp, Artificial Sequence
  Description of Artificial Sequence: Synthetic probe
gtttatttcaacgacgacatcgttc

SEQ ID NO: 1459 - DNA, 25 bp, Artificial Sequence
  Description of Artificial Sequence: Synthetic probe
gtacgctacacatcaactgtcggtg

SEQ ID NO: 1460 - DNA, 25 bp, Artificial Sequence
  Description of Artificial Sequence: Synthetic probe
agagtgtgtgtcaagcggagaaact

SEQ ID NO: 1461 - DNA, 25 bp, Artificial Sequence
  Description of Artificial Sequence: Synthetic probe
ctaaacgacgtcaactgagactggg

SEQ ID NO: 1462 - DNA, 25 bp, Artificial Sequence
  Description of Artificial Sequence: Synthetic probe
cacttgtgtcaagtggtggtggtat

SEQ ID NO: 1463 - DNA, 25 bp, Artificial Sequence
  Description of Artificial Sequence: Synthetic probe
gtgtgtgtgccattgatccattcct

SEQ ID NO: 1464 - DNA, 25 bp, Artificial Sequence
  Description of Artificial Sequence: Synthetic probe
ctagtgtgtccattgtgtgtgcacc

SEQ ID NO: 1465 - DNA, 25 bp, Artificial Sequence
  Description of Artificial Sequence: Synthetic probe
gacgtcatcccatggtgtgtgtcgt

SEQ ID NO: 1466 - DNA, 25 bp, Artificial Sequence
  Description of Artificial Sequence: Synthetic probe
aagggccatgaccacgtcgtccagt

SEQ ID NO: 1467 - DNA, 25 bp, Artificial Sequence
  Description of Artificial Sequence: Synthetic probe
ccgtgagccatgacgacgtcctcga

SEQ ID NO: 1468 - DNA, 25 bp, Artificial Sequence
  Description of Artificial Sequence: Synthetic probe
gtgccgcaccatgacgcatacgtcg

SEQ ID NO: 1469 - DNA, 25 bp, Artificial Sequence
  Description of Artificial Sequence: Synthetic probe
ctccgtctccatgtacgaacttgga

SEQ ID NO: 1470 - DNA, 25 bp, Artificial Sequence
  Description of Artificial Sequence: Synthetic probe
cactaccaccatcgcataaagaagg

SEQ ID NO: 1471 - DNA, 25 bp, Artificial Sequence
  Description of Artificial Sequence: Synthetic probe
agctcgacggcatcctttgtaagca

SEQ ID NO: 1472-1473 - skipped (2 entries)

SEQ ID NO: 1474 - DNA, 25 bp, Artificial Sequence
  Description of Artificial Sequence: Synthetic probe
aggagaaccataccgtccgtgaact

SEQ ID NO: 1475 - DNA, 25 bp, Artificial Sequence
  Description of Artificial Sequence: Synthetic probe
tctctcgacaccatattataatccg

SEQ ID NO: 1476 - DNA, 25 bp, Artificial Sequence
  Description of Artificial Sequence: Synthetic probe
acggtgtgtgcatagtgtgtataca

SEQ ID NO: 1477 - DNA, 25 bp, Artificial Sequence
  Description of Artificial Sequence: Synthetic probe
gggacaatcattgacaccgacgaca

SEQ ID NO: 1478 - DNA, 25 bp, Artificial Sequence
  Description of Artificial Sequence: Synthetic probe
ccgtgcgttcatgtgtcggagacat

SEQ ID NO: 1479 - DNA, 25 bp, Artificial Sequence
  Description of Artificial Sequence: Synthetic probe
agaactacttcatcgagtggtcggc

SEQ ID NO: 1480 - DNA, 25 bp, Artificial Sequence
  Description of Artificial Sequence: Synthetic probe
gtgtcataccgtcatccatcccgag

SEQ ID NO: 1481 - DNA, 25 bp, Artificial Sequence
  Description of Artificial Sequence: Synthetic probe
gctgcttgtcattgtgtgtctttgt

SEQ ID NO: 1482 - DNA, 25 bp, Artificial Sequence
  Description of Artificial Sequence: Synthetic probe
agaacttagtcatgtgtgtgcctta

SEQ ID NO: 1483 - DNA, 25 bp, Artificial Sequence
  Description of Artificial Sequence: Synthetic probe
cacccgtcgtcattagaggaagaat

SEQ ID NO: 1484 - DNA, 25 bp, Artificial Sequence
  Description of Artificial Sequence: Synthetic probe
ttcacaccacaaaaagatattgagt

SEQ ID NO: 1485 - DNA, 25 bp, Artificial Sequence
  Description of Artificial Sequence: Synthetic probe
actgacacacacaaagacagacaca

SEQ ID NO: 1486 - DNA, 25 bp, Artificial Sequence
  Description of Artificial Sequence: Synthetic probe
gcgcgcacacacaaagagccgatga

SEQ ID NO: 1487 - DNA, 25 bp, Artificial Sequence
  Description of Artificial Sequence: Synthetic probe
gaccacacgcacaactcggggcttg

SEQ ID NO: 1488 - DNA, 25 bp, Artificial Sequence
  Description of Artificial Sequence: Synthetic probe
cgatcggacgacaacccgacgcaaa

SEQ ID NO: 1489 - DNA, 25 bp, Artificial Sequence
  Description of Artificial Sequence: Synthetic probe
gtcggtggtgacaagtaaaatcaag

SEQ ID NO: 1490 - DNA, 25 bp, Artificial Sequence
  Description of Artificial Sequence: Synthetic probe
attactcagacaaatgtgtgtggtt

SEQ ID NO: 1491 - DNA, 25 bp, Artificial Sequence
  Description of Artificial Sequence: Synthetic probe
ctacgcgaccgacaactagaggcac

SEQ ID NO: 1492 - DNA, 25 bp, Artificial Sequence
  Description of Artificial Sequence: Synthetic probe
gtctcgcccgacaacgacctcctct

SEQ ID NO: 1493 - DNA, 25 bp, Artificial Sequence
  Description of Artificial Sequence: Synthetic probe
ttgtgacgacgacaactccgccggt

SEQ ID NO: 1494 - DNA, 25 bp, Artificial Sequence
  Description of Artificial Sequence: Synthetic probe
agtacggcgactacaacgacacgtc

SEQ ID NO: 1495 - DNA, 25 bp, Artificial Sequence
  Description of Artificial Sequence: Synthetic probe
cacacgtacacacatttctactcta

SEQ ID NO: 1496 - DNA, 25 bp, Artificial Sequence
  Description of Artificial Sequence: Synthetic probe
tcacacgtacacacatttctactct

SEQ ID NO: 1497 - DNA, 25 bp, Artificial Sequence
  Description of Artificial Sequence: Synthetic probe
gtacacacgtactcacatggtaatt

SEQ ID NO: 1498 - DNA, 25 bp, Artificial Sequence
  Description of Artificial Sequence: Synthetic probe
accacaaacatcacacacacattac

SEQ ID NO: 1499 - DNA, 25 bp, Artificial Sequence
  Description of Artificial Sequence: Synthetic probe
cgtctaccgacgacattccatgtac

SEQ ID NO: 1500 - DNA, 25 bp, Artificial Sequence
  Description of Artificial Sequence: Synthetic probe
ggtactgtgtgacatgtgtggtccc

SEQ ID NO: 1501 - DNA, 25 bp, Artificial Sequence
  Description of Artificial Sequence: Synthetic probe
acgactccgacgacattattcccga

SEQ ID NO: 1502 - DNA, 25 bp, Artificial Sequence
  Description of Artificial Sequence: Synthetic probe
tctgtgtaagacatgtgtgtctgtg

SEQ ID NO: 1503 - DNA, 25 bp, Artificial Sequence
  Description of Artificial Sequence: Synthetic probe
gtacttaacgacgacataggggagc

SEQ ID NO: 1504 - DNA, 25 bp, Artificial Sequence
  Description of Artificial Sequence: Synthetic probe
tcgaactcccaggtgtgtgtgttaa

SEQ ID NO: 1505 - DNA, 25 bp, Artificial Sequence
  Description of Artificial Sequence: Synthetic probe
agaggcaccaggcaccatttcgtgt

SEQ ID NO: 1506 - DNA, 25 bp, Artificial Sequence
  Description of Artificial Sequence: Synthetic probe
cttcagtccagcctccatcagggtt

SEQ ID NO: 1507 - DNA, 25 bp, Artificial Sequence
  Description of Artificial Sequence: Synthetic probe
accactactaccagggactcttttt

SEQ ID NO: 1508 - DNA, 25 bp, Artificial Sequence
  Description of Artificial Sequence: Synthetic probe
gtctacgacacccagcaagaaaatg

SEQ ID NO: 1509 - DNA, 25 bp, Artificial Sequence
  Description of Artificial Sequence: Synthetic probe
ggcccggcagcccaccgccgcgccg

SEQ ID NO: 1510 - DNA, 25 bp, Artificial Sequence
  Description of Artificial Sequence: Synthetic probe
ggtacaccgccagcttctgcacgtg

SEQ ID NO: 1511 - DNA, 25 bp, Artificial Sequence
  Description of Artificial Sequence: Synthetic probe
acactccacgcaggtccacgtgggt

SEQ ID NO: 1512 - DNA, 25 bp, Artificial Sequence
  Description of Artificial Sequence: Synthetic probe
gcttcgacaccagaaccctcaataa

SEQ ID NO: 1513 - DNA, 25 bp, Artificial Sequence
  Description of Artificial Sequence: Synthetic probe
acagccgcgcagcctcccaggccgt

SEQ ID NO: 1514 - DNA, 25 bp, Artificial Sequence
  Description of Artificial Sequence: Synthetic probe
tccgtcgtcccagaggttcctccga

SEQ ID NO: 1515 - DNA, 25 bp, Artificial Sequence
  Description of Artificial Sequence: Synthetic probe
cttagtttcaggacgtgtgtgttac

SEQ ID NO: 1516 - DNA, 25 bp, Artificial Sequence
  Description of Artificial Sequence: Synthetic probe
agcgtgtgcgtcagcaactcgtcgc

SEQ ID NO: 1517 - skipped

SEQ ID NO: 1518 - DNA, 25 bp, Artificial Sequence
  Description of Artificial Sequence: Synthetic probe
gaagaaccgtcagaatgtcgccatg

SEQ ID NO: 1519 - DNA, 25 bp, Artificial Sequence
  Description of Artificial Sequence: Synthetic probe
gtacctacctactcagacgtatgtg

SEQ ID NO: 1520 - DNA, 25 bp, Artificial Sequence
  Description of Artificial Sequence: Synthetic probe
ccaagtgcagtggttgtttcgcgcc

SEQ ID NO: 1521 - DNA, 25 bp, Artificial Sequence
  Description of Artificial Sequence: Synthetic probe
agacgtgcgtgcagtgctatagacc

SEQ ID NO: 1522 - DNA, 25 bp, Artificial Sequence
  Description of Artificial Sequence: Synthetic probe
gtgaccacaccagtagtgccgagag

SEQ ID NO: 1523 - DNA, 25 bp, Artificial Sequence
  Description of Artificial Sequence: Synthetic probe
acgaccgacgcgcagttatcctctt

SEQ ID NO: 1524 - DNA, 25 bp, Artificial Sequence
  Description of Artificial Sequence: Synthetic probe
ggtgtccgccagtacgacgacctcc

SEQ ID NO: 1525 - DNA, 25 bp, Artificial Sequence
  Description of Artificial Sequence: Synthetic probe
cgttgttgtcagtcacctcgtacct

SEQ ID NO: 1526 - DNA, 25 bp, Artificial Sequence
  Description of Artificial Sequence: Synthetic probe
cgtacttgtgtcagtgggtgatgat

SEQ ID NO: 1527 - DNA, 25 bp, Artificial Sequence
  Description of Artificial Sequence: Synthetic probe
gcacgcacaacagcctcaacggtat

SEQ ID NO: 1528 - DNA, 25 bp, Artificial Sequence
  Description of Artificial Sequence: Synthetic probe
ggtgggtgtcagtgagtaccctcct

SEQ ID NO: 1529 - DNA, 25 bp, Artificial Sequence
  Description of Artificial Sequence: Synthetic probe
gacccgccacaggagcaatagctat

SEQ ID NO: 1530 - DNA, 25 bp, Artificial Sequence
  Description of Artificial Sequence: Synthetic probe
cttgtgtgtcagtagtgagcccgaa

SEQ ID NO: 1531 - skipped

SEQ ID NO: 1532 - DNA, 25 bp, Artificial Sequence
  Description of Artificial Sequence: Synthetic probe
agggagcacagcaaccaccggtgtc

SEQ ID NO: 1533 - DNA, 25 bp, Artificial Sequence
  Description of Artificial Sequence: Synthetic probe
gcacacgtacacacaggaaccggct

SEQ ID NO: 1534 - DNA, 25 bp, Artificial Sequence
  Description of Artificial Sequence: Synthetic probe
cttacacacacagcaggaagacgtc

SEQ ID NO: 1535 - DNA, 25 bp, Artificial Sequence
  Description of Artificial Sequence: Synthetic probe
cagaacgacgacaggatgaatctac

SEQ ID NO: 1536 - DNA, 25 bp, Artificial Sequence
  Description of Artificial Sequence: Synthetic probe
gtcacacaccacagctaggacgtat

SEQ ID NO: 1537 - DNA, 25 bp, Artificial Sequence
  Description of Artificial Sequence: Synthetic probe
gtctccgtccacagattcggcctgg

SEQ ID NO: 1538 - DNA, 25 bp, Artificial Sequence
  Description of Artificial Sequence: Synthetic probe
tcgaactccacagaccgggacaact

SEQ ID NO: 1539-1540 - skipped (2 entries)

SEQ ID NO: 1541 - DNA, 25 bp, Artificial Sequence
  Description of Artificial Sequence: Synthetic probe
ttcaggtgacagaccacgcacacgt

SEQ ID NO: 1542 - DNA, 25 bp, Artificial Sequence
  Description of Artificial Sequence: Synthetic probe
ctactagagatacagggtccgtcgt

SEQ ID NO: 1543 - DNA, 25 bp, Artificial Sequence
  Description of Artificial Sequence: Synthetic probe
aaaacacacagtcacaccacacata

SEQ ID NO: 1544 - DNA, 25 bp, Artificial Sequence
  Description of Artificial Sequence: Synthetic probe
tctagtcggcgacagtgtgcgtgtc

SEQ ID NO: 1545 - DNA, 25 bp, Artificial Sequence
  Description of Artificial Sequence: Synthetic probe
ggtcccgacgacagtacattagatc

SEQ ID NO: 1546 - DNA, 25 bp, Artificial Sequence
  Description of Artificial Sequence: Synthetic probe
ggtcccgaaacctgggctactaatt

SEQ ID NO: 1547 - DNA, 25 bp, Artificial Sequence
  Description of Artificial Sequence: Synthetic probe
cgacctacgaaaccgccgcttccgc

SEQ ID NO: 1548 - DNA, 25 bp, Artificial Sequence
  Description of Artificial Sequence: Synthetic probe
gaccgacctaaacccttatgtccga

SEQ ID NO: 1549 - DNA, 25 bp, Artificial Sequence
  Description of Artificial Sequence: Synthetic probe
agtctgtcgaaaccacgtgtgtgtg

SEQ ID NO: 1550 - DNA, 25 bp, Artificial Sequence
  Description of Artificial Sequence: Synthetic probe
cgagacgacgtaaacccggacgtag

SEQ ID NO: 1551 - DNA, 25 bp, Artificial Sequence
  Description of Artificial Sequence: Synthetic probe
acaattaaacctctgtccggtccac

SEQ ID NO: 1552 - DNA, 25 bp, Artificial Sequence
  Description of Artificial Sequence: Synthetic probe
gacatcggcaaccacagcaaccaga

SEQ ID NO: 1553 - DNA, 25 bp, Artificial Sequence
  Description of Artificial Sequence: Synthetic probe
acacgtccgcaacctcacggaaaag

SEQ ID NO: 1554 - DNA, 25 bp, Artificial Sequence
  Description of Artificial Sequence: Synthetic probe
gtttcccaaccgtgtgtgtaacgtc

SEQ ID NO: 1555 - DNA, 25 bp, Artificial Sequence
  Description of Artificial Sequence: Synthetic probe
acgtcgtccgcaacctctagtagtt

SEQ ID NO: 1556 - DNA, 25 bp, Artificial Sequence
  Description of Artificial Sequence: Synthetic probe
atggacacaacccacgtccacgggt

SEQ ID NO: 1557 - DNA, 25 bp, Artificial Sequence
  Description of Artificial Sequence: Synthetic probe
aacaccggaaccaacaggtcagccg

SEQ ID NO: 1558 - DNA, 25 bp, Artificial Sequence
  Description of Artificial Sequence: Synthetic probe
caggggaacccacctcagcaggagt

SEQ ID NO: 1559 - DNA, 25 bp, Artificial Sequence
  Description of Artificial Sequence: Synthetic probe
tcactgttgaaccgccgacgacggt

SEQ ID NO: 1560 - DNA, 25 bp, Artificial Sequence
  Description of Artificial Sequence: Synthetic probe
gtgtgtgaccgaaccttaacccgta

SEQ ID NO: 1561 - DNA, 25 bp, Artificial Sequence
  Description of Artificial Sequence: Synthetic probe
gtgtgtgtgtcgaaccttaaccatc

SEQ ID NO: 1562 - DNA, 25 bp, Artificial Sequence
  Description of Artificial Sequence: Synthetic probe
acgccgccaacaagacactagatga

SEQ ID NO: 1563 - DNA, 25 bp, Artificial Sequence
  Description of Artificial Sequence: Synthetic probe
agagcacaaacacacatacgagttg

SEQ ID NO: 1564 - DNA, 25 bp, Artificial Sequence
  Description of Artificial Sequence: Synthetic probe
tgcacaccgaacacacggaggacgc

SEQ ID NO: 1565 - DNA, 25 bp, Artificial Sequence
  Description of Artificial Sequence: Synthetic probe
ggcacactgtaaccgtccgtcacgg

SEQ ID NO: 1566 - DNA, 25 bp, Artificial Sequence
  Description of Artificial Sequence: Synthetic probe
atcgaaaaacgggacagaggagatc

SEQ ID NO: 1567 - DNA, 25 bp, Artificial Sequence
  Description of Artificial Sequence: Synthetic probe
cgtgtgtgtgaacggtcctcccgtc

SEQ ID NO: 1568 - DNA, 25 bp, Artificial Sequence
  Description of Artificial Sequence: Synthetic probe
gacgtaccgccaacgacgggccgag

SEQ ID NO: 1569 - DNA, 25 bp, Artificial Sequence
  Description of Artificial Sequence: Synthetic probe
gtgtgtgtgtaaacgtgtggcccct

SEQ ID NO: 1570 - DNA, 25 bp, Artificial Sequence
  Description of Artificial Sequence: Synthetic probe
agaacgaactaacgactaccctttg

SEQ ID NO: 1571 - DNA, 25 bp, Artificial Sequence
  Description of Artificial Sequence: Synthetic probe
acttcctagaacgtgcgtgtgtctc

SEQ ID NO: 1572 - DNA, 25 bp, Artificial Sequence
  Description of Artificial Sequence: Synthetic probe
ccaccgtgtaacgtgtgtgtacgca

SEQ ID NO: 1573 - DNA, 25 bp, Artificial Sequence
  Description of Artificial Sequence: Synthetic probe
ttatattctaacgtgtggtgggacc

SEQ ID NO: 1574 - DNA, 25 bp, Artificial Sequence
  Description of Artificial Sequence: Synthetic probe
gcaccaacgcaccattagggaccgt

SEQ ID NO: 1575 - DNA, 25 bp, Artificial Sequence
  Description of Artificial Sequence: Synthetic probe
cagacactccacaccgcgccgcaga

SEQ ID NO: 1576 - DNA, 25 bp, Artificial Sequence
  Description of Artificial Sequence: Synthetic probe
tccgctgccaccatcgtggtgagtt

SEQ ID NO: 1577 - DNA, 25 bp, Artificial Sequence
  Description of Artificial Sequence: Synthetic probe
ctattgctcacctccgtccgatgga

SEQ ID NO: 1578 - DNA, 25 bp, Artificial Sequence
  Description of Artificial Sequence: Synthetic probe
caacacccaccaacagggagctgtt

SEQ ID NO: 1579 - DNA, 25 bp, Artificial Sequence
  Description of Artificial Sequence: Synthetic probe
agttactcaccaccgcctatggacg

SEQ ID NO: 1580 - DNA, 25 bp, Artificial Sequence
  Description of Artificial Sequence: Synthetic probe
cacacacccacccacgcgtaaacac

SEQ ID NO: 1581 - DNA, 25 bp, Artificial Sequence
  Description of Artificial Sequence: Synthetic probe
agcaacgaccaccttgacgacggtt

SEQ ID NO: 1582 - skipped

SEQ ID NO: 1583 - DNA, 25 bp, Artificial Sequence
  Description of Artificial Sequence: Synthetic probe
gagagtcctccaccacaccgtcgct

SEQ ID NO: 1584 - DNA, 25 bp, Artificial Sequence
  Description of Artificial Sequence: Synthetic probe
gccgacgagccaccggcgttgatca

SEQ ID NO: 1585 - DNA, 25 bp, Artificial Sequence
  Description of Artificial Sequence: Synthetic probe
cgcgtgcgtgcacccgtgataaaaa

SEQ ID NO: 1586 - DNA, 25 bp, Artificial Sequence
  Description of Artificial Sequence: Synthetic probe
gtgtgcgtcgccaccgacactcata

SEQ ID NO: 1587 - DNA, 25 bp, Artificial Sequence
  Description of Artificial Sequence: Synthetic probe
cgttccgcacacacatgatgatagt

SEQ ID NO: 1588 - DNA, 25 bp, Artificial Sequence
  Description of Artificial Sequence: Synthetic probe
tgagtccacgcacacatgatccggc

SEQ ID NO: 1589 - DNA, 25 bp, Artificial Sequence
  Description of Artificial Sequence: Synthetic probe
gttatgtccgcaccgactgactcgc

SEQ ID NO: 1590 - DNA, 25 bp, Artificial Sequence
  Description of Artificial Sequence: Synthetic probe
acacatcaccacacatacacatcac

SEQ ID NO: 1591 - DNA, 25 bp, Artificial Sequence
  Description of Artificial Sequence: Synthetic probe
gtccggaccgcacatggaacgaacc

SEQ ID NO: 1592 - DNA, 25 bp, Artificial Sequence
  Description of Artificial Sequence: Synthetic probe
acacacgtactcgcacctgggcctc

SEQ ID NO: 1593 - DNA, 25 bp, Artificial Sequence
  Description of Artificial Sequence: Synthetic probe
acacactcccacactccacactcac

SEQ ID NO: 1594 - DNA, 25 bp, Artificial Sequence
  Description of Artificial Sequence: Synthetic probe
gggttcaccacagggcctctacgtc

SEQ ID NO: 1595 - DNA, 25 bp, Artificial Sequence
  Description of Artificial Sequence: Synthetic probe
ggataacccacacaacatttgtctc

SEQ ID NO: 1596 - DNA, 25 bp, Artificial Sequence
  Description of Artificial Sequence: Synthetic probe
acacacacccacaggttacggaggg

SEQ ID NO: 1597 - DNA, 25 bp, Artificial Sequence
  Description of Artificial Sequence: Synthetic probe
cgccgcccacagttagacgttctgt

SEQ ID NO: 1598 - DNA, 25 bp, Artificial Sequence
  Description of Artificial Sequence: Synthetic probe
gcagacactccacaccgcgccgcag

SEQ ID NO: 1599 - DNA, 25 bp, Artificial Sequence
  Description of Artificial Sequence: Synthetic probe
aagggccacacaccgcactgtacaa

SEQ ID NO: 1600 - DNA, 25 bp, Artificial Sequence
  Description of Artificial Sequence: Synthetic probe
gtacctccggcacaatggtaccgag

SEQ ID NO: 1601 - DNA, 25 bp, Artificial Sequence
  Description of Artificial Sequence: Synthetic probe
ctactcaaccacaccctcagagggc

SEQ ID NO: 1602 - DNA, 25 bp, Artificial Sequence
  Description of Artificial Sequence: Synthetic probe
gtgtacaccgaccacagaggatatg

SEQ ID NO: 1603 - DNA, 25 bp, Artificial Sequence
  Description of Artificial Sequence: Synthetic probe
gtcttacacgtccacagacgcctat

SEQ ID NO: 1604 - DNA, 25 bp, Artificial Sequence
  Description of Artificial Sequence: Synthetic probe
ttcttatccacacacgggagcctct

SEQ ID NO: 1605 - DNA, 25 bp, Artificial Sequence
  Description of Artificial Sequence: Synthetic probe
cgacgccggcacaactgtgtttgac

SEQ ID NO: 1606 - DNA, 25 bp, Artificial Sequence
  Description of Artificial Sequence: Synthetic probe
ggccgcccacacaccaggtggaggt

SEQ ID NO: 1607 - DNA, 25 bp, Artificial Sequence
  Description of Artificial Sequence: Synthetic probe
cagacactccacaccgtgccgcaga

SEQ ID NO: 1608 - DNA, 25 bp, Artificial Sequence
  Description of Artificial Sequence: Synthetic probe
aagacacccacacgccaaagtcaat

SEQ ID NO: 1609 - DNA, 25 bp, Artificial Sequence
  Description of Artificial Sequence: Synthetic probe
atgaactaccacacgcgcaacagcg

SEQ ID NO: 1610 - DNA, 25 bp, Artificial Sequence
  Description of Artificial Sequence: Synthetic probe
ggtatcagaccacacacacgtcttt

SEQ ID NO: 1611 - DNA, 25 bp, Artificial Sequence
  Description of Artificial Sequence: Synthetic probe
cttcgactccacaccgacgtaaggt

SEQ ID NO: 1612 - skipped

SEQ ID NO: 1613 - DNA, 25 bp, Artificial Sequence
  Description of Artificial Sequence: Synthetic probe
tatacgttccgcacacacatgatga

SEQ ID NO: 1614 - DNA, 25 bp, Artificial Sequence
  Description of Artificial Sequence: Synthetic probe
acacgggaccacaccttttcggagg

SEQ ID NO: 1615 - DNA, 25 bp, Artificial Sequence
  Description of Artificial Sequence: Synthetic probe
tctgccgtccacacgacctgtgagt

SEQ ID NO: 1616 - DNA, 25 bp, Artificial Sequence
  Description of Artificial Sequence: Synthetic probe
gtgatcttcgcacaccgcaaccggg

SEQ ID NO: 1617 - DNA, 25 bp, Artificial Sequence
  Description of Artificial Sequence: Synthetic probe
agtcgcgccgcacactcaggacttg

SEQ ID NO: 1618 - skipped

SEQ ID NO: 1619 - DNA, 25 bp, Artificial Sequence
  Description of Artificial Sequence: Synthetic probe
tcacaacgaccacacgtacgaggtg

SEQ ID NO: 1620 - DNA, 25 bp, Artificial Sequence
  Description of Artificial Sequence: Synthetic probe
cgccaccgcacagcgacattatggt

SEQ ID NO: 1621 - DNA, 25 bp, Artificial Sequence
  Description of Artificial Sequence: Synthetic probe
ccgacgtcggcacactcggggcgta

SEQ ID NO: 1622 - DNA, 25 bp, Artificial Sequence
  Description of Artificial Sequence: Synthetic probe
gttccgtcgcgcacacgttctttca

SEQ ID NO: 1623 - DNA, 25 bp, Artificial Sequence
  Description of Artificial Sequence: Synthetic probe
gtccctgtctcaccatggttccttg

SEQ ID NO: 1624 - DNA, 25 bp, Artificial Sequence
  Description of Artificial Sequence: Synthetic probe
gtgggacacgcacacgctctacata

SEQ ID NO: 1625 - DNA, 25 bp, Artificial Sequence
  Description of Artificial Sequence: Synthetic probe
acaggtacacgcacacgcgcacgcg

SEQ ID NO: 1626 - DNA, 25 bp, Artificial Sequence
  Description of Artificial Sequence: Synthetic probe
acacacacgtgcacagagacacacg

SEQ ID NO: 1627 - DNA, 25 bp, Artificial Sequence
  Description of Artificial Sequence: Synthetic probe
gcgcacacgcgcacaacacaagggt

SEQ ID NO: 1628 - DNA, 25 bp, Artificial Sequence
  Description of Artificial Sequence: Synthetic probe
agtactccacgcacacgtccgaggt

SEQ ID NO: 1629 - DNA, 25 bp, Artificial Sequence
  Description of Artificial Sequence: Synthetic probe
cgtcacccgcacatcttccttgttt

SEQ ID NO: 1630 - DNA, 25 bp, Artificial Sequence
  Description of Artificial Sequence: Synthetic probe
gtcacactccgcacacgtggtgacg

SEQ ID NO: 1631 - DNA, 25 bp, Artificial Sequence
  Description of Artificial Sequence: Synthetic probe
gtctttcgagcacacgtacactcca

SEQ ID NO: 1632 - DNA, 25 bp, Artificial Sequence
  Description of Artificial Sequence: Synthetic probe
taccgaccctcaccacagatgtgga

SEQ ID NO: 1633 - DNA, 25 bp, Artificial Sequence
  Description of Artificial Sequence: Synthetic probe
tttcactcgcacacgcgacgtcctc

SEQ ID NO: 1634 - DNA, 25 bp, Artificial Sequence
  Description of Artificial Sequence: Synthetic probe
gtagaacacggcacacacaccacag

SEQ ID NO: 1635 - DNA, 25 bp, Artificial Sequence
  Description of Artificial Sequence: Synthetic probe
acgtaccacgtacgcacacatacat

SEQ ID NO: 1636 - DNA, 25 bp, Artificial Sequence
  Description of Artificial Sequence: Synthetic probe
agtacacccgcacacactgattgtc

SEQ ID NO: 1637 - DNA, 25 bp, Artificial Sequence
  Description of Artificial Sequence: Synthetic probe
acacacgggcacacgtacacacagg

SEQ ID NO: 1638 - DNA, 25 bp, Artificial Sequence
  Description of Artificial Sequence: Synthetic probe
cgcccgttcaccgacgcagaggggt

SEQ ID NO: 1639 - DNA, 25 bp, Artificial Sequence
  Description of Artificial Sequence: Synthetic probe
ctagagggtcaccacacacgcacga

SEQ ID NO: 1640 - DNA, 25 bp, Artificial Sequence
  Description of Artificial Sequence: Synthetic probe
ttaaaatcacacacacgatgagttc

SEQ ID NO: 1641 - DNA, 25 bp, Artificial Sequence
  Description of Artificial Sequence: Synthetic probe
ggtcgacggcgtcacacacgcactt

SEQ ID NO: 1642 - DNA, 25 bp, Artificial Sequence
  Description of Artificial Sequence: Synthetic probe
acagtgtacacgtcacaccacactg

SEQ ID NO: 1643 - DNA, 25 bp, Artificial Sequence
  Description of Artificial Sequence: Synthetic probe
gtgtcccgaccactccggtgggaaa

SEQ ID NO: 1644 - DNA, 25 bp, Artificial Sequence
  Description of Artificial Sequence: Synthetic probe
gtgactcgacccactgtttaggtga

SEQ ID NO: 1645 - DNA, 25 bp, Artificial Sequence
  Description of Artificial Sequence: Synthetic probe
gtgcacacgccactcacaccgtccg

SEQ ID NO: 1646 - DNA, 25 bp, Artificial Sequence
  Description of Artificial Sequence: Synthetic probe
ctacgcctacgcactccgacgttcg

SEQ ID NO: 1647 - DNA, 25 bp, Artificial Sequence
  Description of Artificial Sequence: Synthetic probe
acgtccgaccgcactcctgaaatgg

SEQ ID NO: 1648 - DNA, 25 bp, Artificial Sequence
  Description of Artificial Sequence: Synthetic probe
gtttatacagcactccacactcaaa

SEQ ID NO: 1649 - DNA, 25 bp, Artificial Sequence
  Description of Artificial Sequence: Synthetic probe
cacacacaccactaatcgtacggaa

SEQ ID NO: 1650 - DNA, 25 bp, Artificial Sequence
  Description of Artificial Sequence: Synthetic probe
ggtcccgaccactaccaaggtaagt

SEQ ID NO: 1651 - DNA, 25 bp, Artificial Sequence
  Description of Artificial Sequence: Synthetic probe
atccgacaccactatcaggacatag

SEQ ID NO: 1652 - DNA, 25 bp, Artificial Sequence
  Description of Artificial Sequence: Synthetic probe
aggagtcccactatcgtgtgtgtga

SEQ ID NO: 1653 - DNA, 25 bp, Artificial Sequence
  Description of Artificial Sequence: Synthetic probe
acgtgtgtgccactatagaacgccc

SEQ ID NO: 1654 - DNA, 25 bp, Artificial Sequence
  Description of Artificial Sequence: Synthetic probe
agacgactcacgcacttactcgtct

SEQ ID NO: 1655 - DNA, 25 bp, Artificial Sequence
  Description of Artificial Sequence: Synthetic probe
aactttccactatttacgtctctga

SEQ ID NO: 1656 - DNA, 25 bp, Artificial Sequence
  Description of Artificial Sequence: Synthetic probe
ggtacaccgcgcactacctggtcat

SEQ ID NO: 1657 - DNA, 25 bp, Artificial Sequence
  Description of Artificial Sequence: Synthetic probe
gggtccaccactacgcacacgaggt

SEQ ID NO: 1658 - DNA, 25 bp, Artificial Sequence
  Description of Artificial Sequence: Synthetic probe
ccaattcactgtgtgtgcccgttga

SEQ ID NO: 1659 - DNA, 25 bp, Artificial Sequence
  Description of Artificial Sequence: Synthetic probe
tgttactttcactcgctcactcact

SEQ ID NO: 1660 - DNA, 25 bp, Artificial Sequence
  Description of Artificial Sequence: Synthetic probe
ctaccgtcctcactagtattaaagg

SEQ ID NO: 1661 - DNA, 25 bp, Artificial Sequence
  Description of Artificial Sequence: Synthetic probe
accacggacacacatgcaacataca

SEQ ID NO: 1662 - DNA, 25 bp, Artificial Sequence
  Description of Artificial Sequence: Synthetic probe
gggagcctcactcacacacgcgccg

SEQ ID NO: 1663 - DNA, 25 bp, Artificial Sequence
  Description of Artificial Sequence: Synthetic probe
aactggaacaccacggcccggaacg

SEQ ID NO: 1664 - DNA, 25 bp, Artificial Sequence
  Description of Artificial Sequence: Synthetic probe
ttacaggcacactcccaagttccgg

SEQ ID NO: 1665 - DNA, 25 bp, Artificial Sequence
  Description of Artificial Sequence: Synthetic probe
gtggccgtcacaccgccggagagac

SEQ ID NO: 1666 - DNA, 25 bp, Artificial Sequence
  Description of Artificial Sequence: Synthetic probe
gtgaccaccacaccgaaacttgttt

SEQ ID NO: 1667 - DNA, 25 bp, Artificial Sequence
  Description of Artificial Sequence: Synthetic probe
tcctcaccacacctggtcgaaggtg

SEQ ID NO: 1668 - DNA, 25 bp, Artificial Sequence
  Description of Artificial Sequence: Synthetic probe
agtgaccacacacccagaggaatcg

SEQ ID NO: 1669 - DNA, 25 bp, Artificial Sequence
  Description of Artificial Sequence: Synthetic probe
gcctcgctcacaccgtagagatggt

SEQ ID NO: 1670 - DNA, 25 bp, Artificial Sequence
  Description of Artificial Sequence: Synthetic probe
gttccgcacacacatgatgatagta

SEQ ID NO: 1671 - DNA, 25 bp, Artificial Sequence
  Description of Artificial Sequence: Synthetic probe
ggtggaagacaccatccgacgaccg

SEQ ID NO: 1672 - DNA, 25 bp, Artificial Sequence
  Description of Artificial Sequence: Synthetic probe
acacatcacacacacgtaaaccgta

SEQ ID NO: 1673 - DNA, 25 bp, Artificial Sequence
  Description of Artificial Sequence: Synthetic probe
accacggacacacatcaggggatga

SEQ ID NO: 1674 - DNA, 25 bp, Artificial Sequence
  Description of Artificial Sequence: Synthetic probe
ggagacggaacaccgggacacactc

SEQ ID NO: 1675 - DNA, 25 bp, Artificial Sequence
  Description of Artificial Sequence: Synthetic probe
gttatcctcacaccacacagatggg

SEQ ID NO: 1676 - DNA, 25 bp, Artificial Sequence
  Description of Artificial Sequence: Synthetic probe
gtcgcaccacacaccagagcagaga

SEQ ID NO: 1677 - DNA, 25 bp, Artificial Sequence
  Description of Artificial Sequence: Synthetic probe
cggacacacacacccacgtgtaaac

SEQ ID NO: 1678 - DNA, 25 bp, Artificial Sequence
  Description of Artificial Sequence: Synthetic probe
acaacacacacaccatatatcatac

SEQ ID NO: 1679 - DNA, 25 bp, Artificial Sequence
  Description of Artificial Sequence: Synthetic probe
gtcactccacacaccatacatacaa

SEQ ID NO: 1680 - DNA, 25 bp, Artificial Sequence
  Description of Artificial Sequence: Synthetic probe
tgtctcactgacaccgtatcttagg

SEQ ID NO: 1681 - DNA, 25 bp, Artificial Sequence
  Description of Artificial Sequence: Synthetic probe
tgacacacacacacccagatgtatg

SEQ ID NO: 1682 - DNA, 25 bp, Artificial Sequence
  Description of Artificial Sequence: Synthetic probe
ttcggacacacaccggctgcgtacg

SEQ ID NO: 1683 - DNA, 25 bp, Artificial Sequence
  Description of Artificial Sequence: Synthetic probe
cgaaggacacacacacctataaatt

SEQ ID NO: 1684 - DNA, 25 bp, Artificial Sequence
  Description of Artificial Sequence: Synthetic probe
acgggaccacacacacctgcatggt

SEQ ID NO: 1685 - DNA, 25 bp, Artificial Sequence
  Description of Artificial Sequence: Synthetic probe
gtccgacaccacacagtacctgaaa

SEQ ID NO: 1686 - DNA, 25 bp, Artificial Sequence
  Description of Artificial Sequence: Synthetic probe
atctcaccacacatggttctggtag

SEQ ID NO: 1687 - DNA, 25 bp, Artificial Sequence
  Description of Artificial Sequence: Synthetic probe
acctcacacacacacgggtggtcac

SEQ ID NO: 1688 - DNA, 25 bp, Artificial Sequence
  Description of Artificial Sequence: Synthetic probe
taagtaccacacacactttgagttt

SEQ ID NO: 1689 - DNA, 25 bp, Artificial Sequence
  Description of Artificial Sequence: Synthetic probe
aggtcccacacacgacaggcgtcgg

SEQ ID NO: 1690 - DNA, 25 bp, Artificial Sequence
  Description of Artificial Sequence: Synthetic probe
gtacgtctgcgacgacaccagcttt

SEQ ID NO: 1691 - DNA, 25 bp, Artificial Sequence
  Description of Artificial Sequence: Synthetic probe
gtagacaccgaacacaccaacagtt

SEQ ID NO: 1692 - DNA, 25 bp, Artificial Sequence
  Description of Artificial Sequence: Synthetic probe
tacgttccgcacacacatgatgata

SEQ ID NO: 1693 - DNA, 25 bp, Artificial Sequence
  Description of Artificial Sequence: Synthetic probe
ttcgggacacacacggagcgacagg

SEQ ID NO: 1694 - skipped

SEQ ID NO: 1695 - DNA, 25 bp, Artificial Sequence
  Description of Artificial Sequence: Synthetic probe
ttctggcacacactcgccgatctgt

SEQ ID NO: 1696 - DNA, 25 bp, Artificial Sequence
  Description of Artificial Sequence: Synthetic probe
attacaccacacactcgctcggagt

SEQ ID NO: 1697 - DNA, 25 bp, Artificial Sequence
  Description of Artificial Sequence: Synthetic probe
acgcgaacgacacacacacgatcga

SEQ ID NO: 1698 - DNA, 25 bp, Artificial Sequence
  Description of Artificial Sequence: Synthetic probe
ggggatcacacacgcacaacctgtc

SEQ ID NO: 1699 - DNA, 25 bp, Artificial Sequence
  Description of Artificial Sequence: Synthetic probe
gacatactgacacacacaaagacag

SEQ ID NO: 1700 - DNA, 25 bp, Artificial Sequence
  Description of Artificial Sequence: Synthetic probe
aacaggcacacagacaggcgcgcgc

SEQ ID NO: 1701 - DNA, 25 bp, Artificial Sequence
  Description of Artificial Sequence: Synthetic probe
ccgacactcacacaagtaccctctt

SEQ ID NO: 1702 - skipped

SEQ ID NO: 1703 - DNA, 25 bp, Artificial Sequence
  Description of Artificial Sequence: Synthetic probe
accagggacacacccggtagaaacc

SEQ ID NO: 1704 - DNA, 25 bp, Artificial Sequence
  Description of Artificial Sequence: Synthetic probe
ctacgactggacacaccggattcct

SEQ ID NO: 1705 - DNA, 25 bp, Artificial Sequence
  Description of Artificial Sequence: Synthetic probe
acaccacagacacacatactacagt

SEQ ID NO: 1706 - DNA, 25 bp, Artificial Sequence
  Description of Artificial Sequence: Synthetic probe
gagacagatcacacacacaccaact

SEQ ID NO: 1707 - DNA, 25 bp, Artificial Sequence
  Description of Artificial Sequence: Synthetic probe
tgaacacgcacacacggaagatccc

SEQ ID NO: 1708 - DNA, 25 bp, Artificial Sequence
  Description of Artificial Sequence: Synthetic probe
cgatactcacacacacgagacagat

SEQ ID NO: 1709 - DNA, 25 bp, Artificial Sequence
  Description of Artificial Sequence: Synthetic probe
agggacacacacatagacatgggat

SEQ ID NO: 1710 - DNA, 25 bp, Artificial Sequence
  Description of Artificial Sequence: Synthetic probe
ccgtccgacgacacaagaagtaggt

SEQ ID NO: 1711 - DNA, 25 bp, Artificial Sequence
  Description of Artificial Sequence: Synthetic probe
gtacacactctacacacacgtgtac

SEQ ID NO: 1712 - DNA, 25 bp, Artificial Sequence
  Description of Artificial Sequence: Synthetic probe
ttcacacgcacacacgaaaaatcgc

SEQ ID NO: 1713 - DNA, 25 bp, Artificial Sequence
  Description of Artificial Sequence: Synthetic probe
agtcacatcacacacgtacaggtgg

SEQ ID NO: 1714 - DNA, 25 bp, Artificial Sequence
  Description of Artificial Sequence: Synthetic probe
aagtcacggacacacccaggttatc

SEQ ID NO: 1715 - DNA, 25 bp, Artificial Sequence
  Description of Artificial Sequence: Synthetic probe
aaaactaacacacccacggggtaaa

SEQ ID NO: 1716 - DNA, 25 bp, Artificial Sequence
  Description of Artificial Sequence: Synthetic probe
gtttaacacacacacgagaggcggt

SEQ ID NO: 1717 - DNA, 25 bp, Artificial Sequence
  Description of Artificial Sequence: Synthetic probe
ctagggcacacacacgtttcagttc

SEQ ID NO: 1718 - DNA, 25 bp, Artificial Sequence
  Description of Artificial Sequence: Synthetic probe
gtatcagaccacacacacgtcttta

SEQ ID NO: 1719 - DNA, 25 bp, Artificial Sequence
  Description of Artificial Sequence: Synthetic probe
accgatacacacacacgatacacaa

SEQ ID NO: 1720 - DNA, 25 bp, Artificial Sequence
  Description of Artificial Sequence: Synthetic probe
aaaactacacacactcgcactcaaa

SEQ ID NO: 1721 - DNA, 25 bp, Artificial Sequence
  Description of Artificial Sequence: Synthetic probe
ctaggcacacacactctgaaagggt

SEQ ID NO: 1722 - DNA, 25 bp, Artificial Sequence
  Description of Artificial Sequence: Synthetic probe
cacacgcggacacacccacgtgtaa

SEQ ID NO: 1723 - DNA, 25 bp, Artificial Sequence
  Description of Artificial Sequence: Synthetic probe
ctcgtcgcacgacacaagtggtcac

SEQ ID NO: 1724 - DNA, 25 bp, Artificial Sequence
  Description of Artificial Sequence: Synthetic probe
gcgaacgacacacacacacgatcga

SEQ ID NO: 1725 - DNA, 25 bp, Artificial Sequence
  Description of Artificial Sequence: Synthetic probe
gtccgtacatcacacacgactcgtg

SEQ ID NO: 1726 - DNA, 25 bp, Artificial Sequence
  Description of Artificial Sequence: Synthetic probe
ttgcaacacacacccacgttacgtg

SEQ ID NO: 1727 - DNA, 25 bp, Artificial Sequence
  Description of Artificial Sequence: Synthetic probe
ccacgttacacacacgtttccgggt

SEQ ID NO: 1728 - DNA, 25 bp, Artificial Sequence
  Description of Artificial Sequence: Synthetic probe
gtggtcccacacacaccacaggggt

SEQ ID NO: 1729 - DNA, 25 bp, Artificial Sequence
  Description of Artificial Sequence: Synthetic probe
ccgatactcacacacacgagacaga

SEQ ID NO: 1730 - DNA, 25 bp, Artificial Sequence
  Description of Artificial Sequence: Synthetic probe
cacgcggacacacacacccacggac

SEQ ID NO: 1731 - DNA, 25 bp, Artificial Sequence
  Description of Artificial Sequence: Synthetic probe
tcaggtcgtacacacacacggtcct

SEQ ID NO: 1732 - DNA, 25 bp, Artificial Sequence
  Description of Artificial Sequence: Synthetic probe
caggtgcacacactcctacttgagg

SEQ ID NO: 1733 - DNA, 25 bp, Artificial Sequence
  Description of Artificial Sequence: Synthetic probe
actcacgtactcacacactgtaaac

SEQ ID NO: 1734 - DNA, 25 bp, Artificial Sequence
  Description of Artificial Sequence: Synthetic probe
cgtacacactctacacacacgtgta

SEQ ID NO: 1735 - DNA, 25 bp, Artificial Sequence
  Description of Artificial Sequence: Synthetic probe
gaacgacacacacacacgatcgaca

SEQ ID NO: 1736 - skipped

SEQ ID NO: 1737 - DNA, 25 bp, Artificial Sequence
  Description of Artificial Sequence: Synthetic probe
acacacggagacacacgtgcatgtg

SEQ ID NO: 1738 - DNA, 25 bp, Artificial Sequence
  Description of Artificial Sequence: Synthetic probe
acatactgcgacacacacacagaga

SEQ ID NO: 1739 - DNA, 25 bp, Artificial Sequence
  Description of Artificial Sequence: Synthetic probe
attgggacacacacaacagtccgga

SEQ ID NO: 1740 - DNA, 25 bp, Artificial Sequence
  Description of Artificial Sequence: Synthetic probe
aaatcacgtacacaacggtttcact

SEQ ID NO: 1741 - DNA, 25 bp, Artificial Sequence
  Description of Artificial Sequence: Synthetic probe
tggttctactacacacctcacctgt

SEQ ID NO: 1742 - DNA, 25 bp, Artificial Sequence
  Description of Artificial Sequence: Synthetic probe
atacacacagtacacacagtataca

SEQ ID NO: 1743 - DNA, 25 bp, Artificial Sequence
  Description of Artificial Sequence: Synthetic probe
gtcccgtccgtacacataacaaagg

SEQ ID NO: 1744 - DNA, 25 bp, Artificial Sequence
  Description of Artificial Sequence: Synthetic probe
gggcccacactcacgctcactcgcg

SEQ ID NO: 1745 - DNA, 25 bp, Artificial Sequence
  Description of Artificial Sequence: Synthetic probe
acgtcacgggacactccataagggt

SEQ ID NO: 1746 - DNA, 25 bp, Artificial Sequence
  Description of Artificial Sequence: Synthetic probe
ttcgtccacacactttctgctaggt

SEQ ID NO: 1747 - DNA, 25 bp, Artificial Sequence
  Description of Artificial Sequence: Synthetic probe
actcaaccacacttaatacatactc

SEQ ID NO: 1748 - DNA, 25 bp, Artificial Sequence
  Description of Artificial Sequence: Synthetic probe
acgtacacactctacacacacgtgt

SEQ ID NO: 1749 - DNA, 25 bp, Artificial Sequence
  Description of Artificial Sequence: Synthetic probe
agacgtccacacacttaacgtggta

SEQ ID NO: 1750 - DNA, 25 bp, Artificial Sequence
  Description of Artificial Sequence: Synthetic probe
gcaactacgcacactggctgtaact

SEQ ID NO: 1751 - DNA, 25 bp, Artificial Sequence
  Description of Artificial Sequence: Synthetic probe
cccgtacacacacttctagtaggga

SEQ ID NO: 1752 - DNA, 25 bp, Artificial Sequence
  Description of Artificial Sequence: Synthetic probe
cacactcacacactcatcctctctc

SEQ ID NO: 1753 - DNA, 25 bp, Artificial Sequence
  Description of Artificial Sequence: Synthetic probe
gtcgttagcgtcacactcccactgg

SEQ ID NO: 1754 - DNA, 25 bp, Artificial Sequence
  Description of Artificial Sequence: Synthetic probe
actccgacccacgagtccttccggg

SEQ ID NO: 1755 - DNA, 25 bp, Artificial Sequence
  Description of Artificial Sequence: Synthetic probe
ttcaccgccacgacgaagaaggacg

SEQ ID NO: 1756 - DNA, 25 bp, Artificial Sequence
  Description of Artificial Sequence: Synthetic probe
acctctggcacgcacggtatgcctt

SEQ ID NO: 1757 - DNA, 25 bp, Artificial Sequence
  Description of Artificial Sequence: Synthetic probe
tttaccgccacgctacctcgtatga

SEQ ID NO: 1758 - DNA, 25 bp, Artificial Sequence
  Description of Artificial Sequence: Synthetic probe
cggtcggccacgcaggaaattagga

SEQ ID NO: 1759 - DNA, 25 bp, Artificial Sequence
  Description of Artificial Sequence: Synthetic probe
actagaagtaccacgcacacgccgt

SEQ ID NO: 1760 - DNA, 25 bp, Artificial Sequence
  Description of Artificial Sequence: Synthetic probe
agtcaacgaccacgctgttctagga

SEQ ID NO: 1761 - DNA, 25 bp, Artificial Sequence
  Description of Artificial Sequence: Synthetic probe
cgccgacgagcacgaccgacaaggt

SEQ ID NO: 1762 - DNA, 25 bp, Artificial Sequence
  Description of Artificial Sequence: Synthetic probe
ccaccgaccacgagcatagatgttt

SEQ ID NO: 1763 - DNA, 25 bp, Artificial Sequence
  Description of Artificial Sequence: Synthetic probe
atgtaagtaccacgggcacacacac

SEQ ID NO: 1764 - DNA, 25 bp, Artificial Sequence
  Description of Artificial Sequence: Synthetic probe
gtgacacctacgcacgcacgaggtc

SEQ ID NO: 1765 - DNA, 25 bp, Artificial Sequence
  Description of Artificial Sequence: Synthetic probe
acctccgtccacgaagatgacgacg

SEQ ID NO: 1766 - DNA, 25 bp, Artificial Sequence
  Description of Artificial Sequence: Synthetic probe
acgagactacgccacgacgcagagg

SEQ ID NO: 1767 - DNA, 25 bp, Artificial Sequence
  Description of Artificial Sequence: Synthetic probe
gttgctacgaccacgagtcccatgt

SEQ ID NO: 1768 - DNA, 25 bp, Artificial Sequence
  Description of Artificial Sequence: Synthetic probe
ttcccgaccacgagaaaccatcttt

SEQ ID NO: 1769 - DNA, 25 bp, Artificial Sequence
  Description of Artificial Sequence: Synthetic probe
tttaaccacacgaccacacatgggt

SEQ ID NO: 1770 - DNA, 25 bp, Artificial Sequence
  Description of Artificial Sequence: Synthetic probe
atcccagacacggttatacgcttag

SEQ ID NO: 1771 - DNA, 25 bp, Artificial Sequence
  Description of Artificial Sequence: Synthetic probe
agctccgaccacgtttggaccgtac

SEQ ID NO: 1772 - DNA, 25 bp, Artificial Sequence
  Description of Artificial Sequence: Synthetic probe
actaccgcaccacgtctctagttga

SEQ ID NO: 1773 - DNA, 25 bp, Artificial Sequence
  Description of Artificial Sequence: Synthetic probe
cctccagacacggtgcatacggtag

SEQ ID NO: 1774 - DNA, 25 bp, Artificial Sequence
  Description of Artificial Sequence: Synthetic probe
tgctcgctccacgtccgaggtactt

SEQ ID NO: 1775 - DNA, 25 bp, Artificial Sequence
  Description of Artificial Sequence: Synthetic probe
ctagacaactcacgttagtagagtg

SEQ ID NO: 1776 - DNA, 25 bp, Artificial Sequence
  Description of Artificial Sequence: Synthetic probe
agggtcgcacacgtacaacaatgtc

SEQ ID NO: 1777 - DNA, 25 bp, Artificial Sequence
  Description of Artificial Sequence: Synthetic probe
gtgggacacacacgtcctcgatacg

SEQ ID NO: 1778 - DNA, 25 bp, Artificial Sequence
  Description of Artificial Sequence: Synthetic probe
ggataacacacacgtcctccggaca

SEQ ID NO: 1779 - DNA, 25 bp, Artificial Sequence
  Description of Artificial Sequence: Synthetic probe
tgggacacacacgtcctcgatacga

SEQ ID NO: 1780 - DNA, 25 bp, Artificial Sequence
  Description of Artificial Sequence: Synthetic probe
gtccggacacacacggaaaggaccg

SEQ ID NO: 1781 - DNA, 25 bp, Artificial Sequence
  Description of Artificial Sequence: Synthetic probe
aggtacacgcacacgcgcacgcgcg

SEQ ID NO: 1782 - DNA, 25 bp, Artificial Sequence
  Description of Artificial Sequence: Synthetic probe
acgtctgcacacacggtctgacagg

SEQ ID NO: 1783 - DNA, 25 bp, Artificial Sequence
  Description of Artificial Sequence: Synthetic probe
aacacacacacacgggcacaggtac

SEQ ID NO: 1784 - DNA, 25 bp, Artificial Sequence
  Description of Artificial Sequence: Synthetic probe
agtgacacactacacgctactcggt

SEQ ID NO: 1785 - DNA, 25 bp, Artificial Sequence
  Description of Artificial Sequence: Synthetic probe
agatctccgacacgaccagggacat

SEQ ID NO: 1786 - DNA, 25 bp, Artificial Sequence
  Description of Artificial Sequence: Synthetic probe
gacaccaggacacgtttacagaatc

SEQ ID NO: 1787 - DNA, 25 bp, Artificial Sequence
  Description of Artificial Sequence: Synthetic probe
atactcacacacacgagacagatca

SEQ ID NO: 1788 - DNA, 25 bp, Artificial Sequence
  Description of Artificial Sequence: Synthetic probe
acacttatcacacgtacacacagct

SEQ ID NO: 1789 - DNA, 25 bp, Artificial Sequence
  Description of Artificial Sequence: Synthetic probe
ctacacaccacacgagacgggtcgt

SEQ ID NO: 1790 - DNA, 25 bp, Artificial Sequence
  Description of Artificial Sequence: Synthetic probe
gatactcacacacacgagacagatc

SEQ ID NO: 1791 - DNA, 25 bp, Artificial Sequence
  Description of Artificial Sequence: Synthetic probe
cacccacacacgtactcgcacctgg

SEQ ID NO: 1792 - DNA, 25 bp, Artificial Sequence
  Description of Artificial Sequence: Synthetic probe
agaccacgcacacgtactcgaacat

SEQ ID NO: 1793 - DNA, 25 bp, Artificial Sequence
  Description of Artificial Sequence: Synthetic probe
ttgtgtccacacgacccgagactcg

SEQ ID NO: 1794 - DNA, 25 bp, Artificial Sequence
  Description of Artificial Sequence: Synthetic probe
gtccgggacacacgaacgacggaga

SEQ ID NO: 1795 - DNA, 25 bp, Artificial Sequence
  Description of Artificial Sequence: Synthetic probe
cgattactacacacgtacacggtct

SEQ ID NO: 1796 - DNA, 25 bp, Artificial Sequence
  Description of Artificial Sequence: Synthetic probe
acacgcacgcacacgtacgtatata

SEQ ID NO: 1797 - DNA, 25 bp, Artificial Sequence
  Description of Artificial Sequence: Synthetic probe
gtacgtatgcacacacgtatctgga

SEQ ID NO: 1798 - skipped

SEQ ID NO: 1799 - DNA, 25 bp, Artificial Sequence
  Description of Artificial Sequence: Synthetic probe
gtccgccgaggaaagacacgggtca

SEQ ID NO: 1800 - DNA, 25 bp, Artificial Sequence
  Description of Artificial Sequence: Synthetic probe
acgggttaggaaactaatcagttac

SEQ ID NO: 1801 - DNA, 25 bp, Artificial Sequence
  Description of Artificial Sequence: Synthetic probe
agaaagcggaaagaaagacctcagc

SEQ ID NO: 1802 - skipped

SEQ ID NO: 1803 - DNA, 25 bp, Artificial Sequence
  Description of Artificial Sequence: Synthetic probe
atctcgaacggaacgaattactcgt

SEQ ID NO: 1804 - DNA, 25 bp, Artificial Sequence
  Description of Artificial Sequence: Synthetic probe
cgactcgactcggaacgctgggcca

SEQ ID NO: 1805 - DNA, 25 bp, Artificial Sequence
  Description of Artificial Sequence: Synthetic probe
ggacgtccacggaacgacaccaggg

SEQ ID NO: 1806-1807 - skipped (2 entries)

SEQ ID NO: 1808 - DNA, 25 bp, Artificial Sequence
  Description of Artificial Sequence: Synthetic probe
agtctgctgtgaaccaactcgggtc

SEQ ID NO: 1809 - skipped

SEQ ID NO: 1810 - DNA, 25 bp, Artificial Sequence
  Description of Artificial Sequence: Synthetic probe
caaggtggatgtcctgtgtctgagt

SEQ ID NO: 1811 - DNA, 25 bp, Artificial Sequence
  Description of Artificial Sequence: Synthetic probe
ttcgggtgtgatgataggagaaaca

SEQ ID NO: 1812 - DNA, 25 bp, Artificial Sequence
  Description of Artificial Sequence: Synthetic probe
gtgtggttgtgattaagcaaaccct

SEQ ID NO: 1813 - DNA, 25 bp, Artificial Sequence
  Description of Artificial Sequence: Synthetic probe
aatgtttgattctgtgttggtgcgt

SEQ ID NO: 1814 - DNA, 25 bp, Artificial Sequence
  Description of Artificial Sequence: Synthetic probe
aatcgtgtgtgatttggatcaaatc

SEQ ID NO: 1815 - DNA, 25 bp, Artificial Sequence
  Description of Artificial Sequence: Synthetic probe
aaagtcgtcgtgattgttacatccc

SEQ ID NO: 1816 - DNA, 25 bp, Artificial Sequence
  Description of Artificial Sequence: Synthetic probe
taactcggtcgtgatcgtgggtcta

SEQ ID NO: 1817 - DNA, 25 bp, Artificial Sequence
  Description of Artificial Sequence: Synthetic probe
cttggaagaagcctctggacgacga

SEQ ID NO: 1818 - DNA, 25 bp, Artificial Sequence
  Description of Artificial Sequence: Synthetic probe
agccgtcgcagaaacctcgttccgt

SEQ ID NO: 1819 - DNA, 25 bp, Artificial Sequence
  Description of Artificial Sequence: Synthetic probe
acacgtacacacagaagtcggctta

SEQ ID NO: 1820 - DNA, 25 bp, Artificial Sequence
  Description of Artificial Sequence: Synthetic probe
cttgggagaagacacacacgtttca

SEQ ID NO: 1821 - DNA, 25 bp, Artificial Sequence
  Description of Artificial Sequence: Synthetic probe
attctccgagaagtgtgtgttgtcc

SEQ ID NO: 1822 - DNA, 25 bp, Artificial Sequence
  Description of Artificial Sequence: Synthetic probe
tgcgtgagcgagaaccctcttctct

SEQ ID NO: 1823-1825 - skipped (3 entries)

SEQ ID NO: 1826 - DNA, 25 bp, Artificial Sequence
  Description of Artificial Sequence: Synthetic probe
ctcatcttagatgtgtgcgtttcgt

SEQ ID NO: 1827 - DNA, 25 bp, Artificial Sequence
  Description of Artificial Sequence: Synthetic probe
gtgtcggtcggagatactcttcaat

SEQ ID NO: 1828 - skipped

SEQ ID NO: 1829 - DNA, 25 bp, Artificial Sequence
  Description of Artificial Sequence: Synthetic probe
tctgcagggagggataacgtgtacc

SEQ ID NO: 1830 - skipped

SEQ ID NO: 1831 - DNA, 25 bp, Artificial Sequence
  Description of Artificial Sequence: Synthetic probe
ccgtggtggaggtgataagtccttc

SEQ ID NO: 1832 - skipped

SEQ ID NO: 1833 - DNA, 25 bp, Artificial Sequence
  Description of Artificial Sequence: Synthetic probe
gtggtgttggagacctttagttaat

SEQ ID NO: 1834 - DNA, 25 bp, Artificial Sequence
  Description of Artificial Sequence: Synthetic probe
aatacttctgaggtgtggtgagtat

SEQ ID NO: 1835 - DNA, 25 bp, Artificial Sequence
  Description of Artificial Sequence: Synthetic probe
ttggagttgagccaccacgacgccg

SEQ ID NO: 1836 - DNA, 25 bp, Artificial Sequence
  Description of Artificial Sequence: Synthetic probe
ccttttgaggtgtgtgtttcgtgga

SEQ ID NO: 1837 - skipped

SEQ ID NO: 1838 - DNA, 25 bp, Artificial Sequence
  Description of Artificial Sequence: Synthetic probe
aagtctattgagtggtggtggaaac

SEQ ID NO: 1839 - DNA, 25 bp, Artificial Sequence
  Description of Artificial Sequence: Synthetic probe
taagtgtgtgtgaggatataacggt

SEQ ID NO: 1840 - DNA, 25 bp, Artificial Sequence
  Description of Artificial Sequence: Synthetic probe
gtctgttgtgtgaggtcctttgtct

SEQ ID NO: 1841 - DNA, 25 bp, Artificial Sequence
  Description of Artificial Sequence: Synthetic probe
ccagtgtgtgagcattcgttgtctt

SEQ ID NO: 1842 - DNA, 25 bp, Artificial Sequence
  Description of Artificial Sequence: Synthetic probe
gtcgcgtgcgcgtgagctacggaga

SEQ ID NO: 1843 - DNA, 25 bp, Artificial Sequence
  Description of Artificial Sequence: Synthetic probe
cgttatagtagtggtgtgcgtgaat

SEQ ID NO: 1844-1845 - skipped (2 entries)

SEQ ID NO: 1846 - DNA, 25 bp, Artificial Sequence
  Description of Artificial Sequence: Synthetic probe
ctctcagggagtccacacaccgttg

SEQ ID NO: 1847 - DNA, 25 bp, Artificial Sequence
  Description of Artificial Sequence: Synthetic probe
agtgtgtgtacggagtccacccgac

SEQ ID NO: 1848 - DNA, 25 bp, Artificial Sequence
  Description of Artificial Sequence: Synthetic probe
tcggtggtgtgagtctgaattcaca

SEQ ID NO: 1849 - DNA, 25 bp, Artificial Sequence
  Description of Artificial Sequence: Synthetic probe
ataagtgtgtgagtttcccaggtcc

SEQ ID NO: 1850 - DNA, 25 bp, Artificial Sequence
  Description of Artificial Sequence: Synthetic probe
gaggtctgtgtgagtcttaacttaa

SEQ ID NO: 1851 - DNA, 25 bp, Artificial Sequence
  Description of Artificial Sequence: Synthetic probe
gactttatcgtgagtgtggatccaa

SEQ ID NO: 1852 - DNA, 25 bp, Artificial Sequence
  Description of Artificial Sequence: Synthetic probe
gtcctctgtgtgagtgcctcggagc

SEQ ID NO: 1853 - DNA, 25 bp, Artificial Sequence
  Description of Artificial Sequence: Synthetic probe
accgggtgtgagtgatcgtcacatt

SEQ ID NO: 1854 - DNA, 25 bp, Artificial Sequence
  Description of Artificial Sequence: Synthetic probe
caactaggtgagtgtgtgaatcgac

SEQ ID NO: 1855 - DNA, 25 bp, Artificial Sequence
  Description of Artificial Sequence: Synthetic probe
acttagtaggtgagtgtgtctccga

SEQ ID NO: 1856 - DNA, 25 bp, Artificial Sequence
  Description of Artificial Sequence: Synthetic probe
gtgtgtgtcgtatgagtagaagaaa

SEQ ID NO: 1857 - DNA, 25 bp, Artificial Sequence
  Description of Artificial Sequence: Synthetic probe
gcgcccagcgcgggaagtacttcta

SEQ ID NO: 1858 - DNA, 25 bp, Artificial Sequence
  Description of Artificial Sequence: Synthetic probe
acactcgtccagagattcggaacca

SEQ ID NO: 1859 - DNA, 25 bp, Artificial Sequence
  Description of Artificial Sequence: Synthetic probe
tcacacacacagagatgggtcgaga

SEQ ID NO: 1860 - DNA, 25 bp, Artificial Sequence
  Description of Artificial Sequence: Synthetic probe
cgtccctcagagtcttaccaaaggt

SEQ ID NO: 1861 - DNA, 25 bp, Artificial Sequence
  Description of Artificial Sequence: Synthetic probe
gtaaccacaccgaaacccgtccaag

SEQ ID NO: 1862 - DNA, 25 bp, Artificial Sequence
  Description of Artificial Sequence: Synthetic probe
ctccgtcccgaagattcggagactc

SEQ ID NO: 1863 - DNA, 25 bp, Artificial Sequence
  Description of Artificial Sequence: Synthetic probe
gtgtccgagaccgaactcctctaaa

SEQ ID NO: 1864 - DNA, 25 bp, Artificial Sequence
  Description of Artificial Sequence: Synthetic probe
acagccgtccgaaccgtttctacga

SEQ ID NO: 1865 - DNA, 25 bp, Artificial Sequence
  Description of Artificial Sequence: Synthetic probe
gtggacacaccgaacacacacgggg

SEQ ID NO: 1866 - DNA, 25 bp, Artificial Sequence
  Description of Artificial Sequence: Synthetic probe
ggcgtgtggcgaagagaattacctt

SEQ ID NO: 1867 - DNA, 25 bp, Artificial Sequence
  Description of Artificial Sequence: Synthetic probe
gtggtgtggcgaacactaagagtcc

SEQ ID NO: 1868 - DNA, 25 bp, Artificial Sequence
  Description of Artificial Sequence: Synthetic probe
tcacacacacgcgaaccaagtcatt

SEQ ID NO: 1869 - DNA, 25 bp, Artificial Sequence
  Description of Artificial Sequence: Synthetic probe
gacacacatgcgaacacacacgcga

SEQ ID NO: 1870 - DNA, 25 bp, Artificial Sequence
  Description of Artificial Sequence: Synthetic probe
cccgtatgcgaactgtgtgtgcgta

SEQ ID NO: 1871 - DNA, 25 bp, Artificial Sequence
  Description of Artificial Sequence: Synthetic probe
acggtgacttcgattgtgtggatac

SEQ ID NO: 1872 - DNA, 25 bp, Artificial Sequence
  Description of Artificial Sequence: Synthetic probe
cacgtccgaccgatttaggtttttc

SEQ ID NO: 1873 - DNA, 25 bp, Artificial Sequence
  Description of Artificial Sequence: Synthetic probe
gtactacaacgtccgatgggtccag

SEQ ID NO: 1874 - DNA, 25 bp, Artificial Sequence
  Description of Artificial Sequence: Synthetic probe
gtgtgggtgtcgattctgcgaccct

SEQ ID NO: 1875 - DNA, 25 bp, Artificial Sequence
  Description of Artificial Sequence: Synthetic probe
cgagtgtgtccgatcgtctgtcgtc

SEQ ID NO: 1876 - DNA, 25 bp, Artificial Sequence
  Description of Artificial Sequence: Synthetic probe
attcttctacgaattcaaggtaacg

SEQ ID NO: 1877 - DNA, 25 bp, Artificial Sequence
  Description of Artificial Sequence: Synthetic probe
gcctaaaacgaaagcgacggcgctc

SEQ ID NO: 1878 - DNA, 25 bp, Artificial Sequence
  Description of Artificial Sequence: Synthetic probe
agaccaccacgaacagactcgtcgg

SEQ ID NO: 1879 - DNA, 25 bp, Artificial Sequence
  Description of Artificial Sequence: Synthetic probe
acgacacccgacgatctttgaagta

SEQ ID NO: 1880 - DNA, 25 bp, Artificial Sequence
  Description of Artificial Sequence: Synthetic probe
gcgttccgacgacgatctggtccgc

SEQ ID NO: 1881 - DNA, 25 bp, Artificial Sequence
  Description of Artificial Sequence: Synthetic probe
acaccgaccacgatcaaacttgacg

SEQ ID NO: 1882 - DNA, 25 bp, Artificial Sequence
  Description of Artificial Sequence: Synthetic probe
cgactgtaggcgaggttgtccaaag

SEQ ID NO: 1883 - DNA, 25 bp, Artificial Sequence
  Description of Artificial Sequence: Synthetic probe
actgtcggtcgtacgatgggtcaca

SEQ ID NO: 1884 - DNA, 25 bp, Artificial Sequence
  Description of Artificial Sequence: Synthetic probe
ctgaccgaccgagcgggtgcctctt

SEQ ID NO: 1885 - DNA, 25 bp, Artificial Sequence
  Description of Artificial Sequence: Synthetic probe
ctgtcgtctgtcgaggccatactcc

SEQ ID NO: 1886 - DNA, 25 bp, Artificial Sequence
  Description of Artificial Sequence: Synthetic probe
cgtctccactcgagagcgaccggta

SEQ ID NO: 1887 - DNA, 25 bp, Artificial Sequence
  Description of Artificial Sequence: Synthetic probe
tcaccgcgaccgagtacttattagt

SEQ ID NO: 1888 - DNA, 25 bp, Artificial Sequence
  Description of Artificial Sequence: Synthetic probe
atctacctaccgagtgaatgaccgt

SEQ ID NO: 1889 - DNA, 25 bp, Artificial Sequence
  Description of Artificial Sequence: Synthetic probe
ccgggtccgagtacttcggcgtcgt

SEQ ID NO: 1890 - DNA, 25 bp, Artificial Sequence
  Description of Artificial Sequence: Synthetic probe
gtagtattgttcgagtgtgtacgcg

SEQ ID NO: 1891 - DNA, 25 bp, Artificial Sequence
  Description of Artificial Sequence: Synthetic probe
cgacgagccacgaggttcacttcgc

SEQ ID NO: 1892 - DNA, 25 bp, Artificial Sequence
  Description of Artificial Sequence: Synthetic probe
aagagacggtacgagtgtggcaacc

SEQ ID NO: 1893 - DNA, 25 bp, Artificial Sequence
  Description of Artificial Sequence: Synthetic probe
accaccgacacgaggttctcattcg

SEQ ID NO: 1894 - DNA, 25 bp, Artificial Sequence
  Description of Artificial Sequence: Synthetic probe
caccgaccacgagcatagatgtttt

SEQ ID NO: 1895 - DNA, 25 bp, Artificial Sequence
  Description of Artificial Sequence: Synthetic probe
tactcacacacacgagacagatcac

SEQ ID NO: 1896 - DNA, 25 bp, Artificial Sequence
  Description of Artificial Sequence: Synthetic probe
cgtgggtgacgagtctgtgctctct

SEQ ID NO: 1897 - DNA, 25 bp, Artificial Sequence
  Description of Artificial Sequence: Synthetic probe
tttccgggacccgttaatcgaggag

SEQ ID NO: 1898 - DNA, 25 bp, Artificial Sequence
  Description of Artificial Sequence: Synthetic probe
acactgggtgaccacgcgcaccgag

SEQ ID NO: 1899 - DNA, 25 bp, Artificial Sequence
  Description of Artificial Sequence: Synthetic probe
gaggtccaggaccacacacggagaa

SEQ ID NO: 1900 - DNA, 25 bp, Artificial Sequence
  Description of Artificial Sequence: Synthetic probe
agatgacgggacaacaccttaaaat

SEQ ID NO: 1901 - DNA, 25 bp, Artificial Sequence
  Description of Artificial Sequence: Synthetic probe
tcacctcgcggacacctaaatcggc

SEQ ID NO: 1902 - DNA, 25 bp, Artificial Sequence
  Description of Artificial Sequence: Synthetic probe
agtgaaaggacacgcaccgacaccg

SEQ ID NO: 1903 - DNA, 25 bp, Artificial Sequence
  Description of Artificial Sequence: Synthetic probe
ctgaacgggacacgcgacaccatgt

SEQ ID NO: 1904 - DNA, 25 bp, Artificial Sequence
  Description of Artificial Sequence: Synthetic probe
aagtacaaggacactggacacacca

SEQ ID NO: 1905 - DNA, 25 bp, Artificial Sequence
  Description of Artificial Sequence: Synthetic probe
cacacacgcggacacacccacgtgt

SEQ ID NO: 1906 - DNA, 25 bp, Artificial Sequence
  Description of Artificial Sequence: Synthetic probe
ttccacctgacctcgagggagactt

SEQ ID NO: 1907 - skipped

SEQ ID NO: 1908 - DNA, 25 bp, Artificial Sequence
  Description of Artificial Sequence: Synthetic probe
acagtacatggacaccgacgagtta

SEQ ID NO: 1909 - DNA, 25 bp, Artificial Sequence
  Description of Artificial Sequence: Synthetic probe
ctcgccgcgtgaccaggtccatctc

SEQ ID NO: 1910 - DNA, 25 bp, Artificial Sequence
  Description of Artificial Sequence: Synthetic probe
acgtgcgtgctgacctaccgtccga

SEQ ID NO: 1911 - DNA, 25 bp, Artificial Sequence
  Description of Artificial Sequence: Synthetic probe
cgtagtaccactgacctccacggag

SEQ ID NO: 1912 - DNA, 25 bp, Artificial Sequence
  Description of Artificial Sequence: Synthetic probe
gcttcattgacaccgaccacgacag

SEQ ID NO: 1913 - DNA, 25 bp, Artificial Sequence
  Description of Artificial Sequence: Synthetic probe
agactacgtcgtggactgttcccgg

SEQ ID NO: 1914 - DNA, 25 bp, Artificial Sequence
  Description of Artificial Sequence: Synthetic probe
gtgtccttggactcgaggtgtcctg

SEQ ID NO: 1915 - DNA, 25 bp, Artificial Sequence
  Description of Artificial Sequence: Synthetic probe
gttgttatggactatgctacttttt

SEQ ID NO: 1916 - DNA, 25 bp, Artificial Sequence
  Description of Artificial Sequence: Synthetic probe
gtgacccatgactaccgaaccgaca

SEQ ID NO: 1917 - DNA, 25 bp, Artificial Sequence
  Description of Artificial Sequence: Synthetic probe
gtagtggtggtgactgttccactcc

SEQ ID NO: 1918 - DNA, 25 bp, Artificial Sequence
  Description of Artificial Sequence: Synthetic probe
gaaggtatcagaccacacacacgtc

SEQ ID NO: 1919 - DNA, 25 bp, Artificial Sequence
  Description of Artificial Sequence: Synthetic probe
aaggtatcagaccacacacacgtct

SEQ ID NO: 1920 - DNA, 25 bp, Artificial Sequence
  Description of Artificial Sequence: Synthetic probe
cgacgcacgcagacacaccaatgat

SEQ ID NO: 1921 - DNA, 25 bp, Artificial Sequence
  Description of Artificial Sequence: Synthetic probe
gtgtctgtgtaagacatgtgtgtct

SEQ ID NO: 1922 - DNA, 25 bp, Artificial Sequence
  Description of Artificial Sequence: Synthetic probe
atatcgacgacagacagatcgggtc

SEQ ID NO: 1923 - DNA, 25 bp, Artificial Sequence
  Description of Artificial Sequence: Synthetic probe
gaacccacagacacacttaaatagt

SEQ ID NO: 1924 - DNA, 25 bp, Artificial Sequence
  Description of Artificial Sequence: Synthetic probe
agctgtcgagtagacaatccgattc

SEQ ID NO: 1925 - DNA, 25 bp, Artificial Sequence
  Description of Artificial Sequence: Synthetic probe
acaaaactagactgcgtccgaatac

SEQ ID NO: 1926 - DNA, 25 bp, Artificial Sequence
  Description of Artificial Sequence: Synthetic probe
ccagagggacgcgtgtgccgactga

SEQ ID NO: 1927 - skipped

SEQ ID NO: 1928 - DNA, 25 bp, Artificial Sequence
  Description of Artificial Sequence: Synthetic probe
agcacactctgacgacacacactgt

SEQ ID NO: 1929 - DNA, 25 bp, Artificial Sequence
  Description of Artificial Sequence: Synthetic probe
cagtacatgtgacgtgcgagcgatc

SEQ ID NO: 1930 - DNA, 25 bp, Artificial Sequence
  Description of Artificial Sequence: Synthetic probe
actcccgatgacgtagaggtaagag

SEQ ID NO: 1931 - DNA, 25 bp, Artificial Sequence
  Description of Artificial Sequence: Synthetic probe
atacacacacagacgcgttcactct

SEQ ID NO: 1932 - DNA, 25 bp, Artificial Sequence
  Description of Artificial Sequence: Synthetic probe
gtaccgacccagacgatgtaatgtt

SEQ ID NO: 1933 - DNA, 25 bp, Artificial Sequence
  Description of Artificial Sequence: Synthetic probe
ggacacacacagacgcgtccagaca

SEQ ID NO: 1934 - DNA, 25 bp, Artificial Sequence
  Description of Artificial Sequence: Synthetic probe
cgtacgcccagacgagtgtgtatac

SEQ ID NO: 1935 - DNA, 25 bp, Artificial Sequence
  Description of Artificial Sequence: Synthetic probe
aggaaaccgacgaccatccgaatgt

SEQ ID NO: 1936 - DNA, 25 bp, Artificial Sequence
  Description of Artificial Sequence: Synthetic probe
gaaagaaccgacctgcctccgaacg

SEQ ID NO: 1937 - DNA, 25 bp, Artificial Sequence
  Description of Artificial Sequence: Synthetic probe
gttcattccgaccatcaccttgtat

SEQ ID NO: 1938 - DNA, 25 bp, Artificial Sequence
  Description of Artificial Sequence: Synthetic probe
gacctccaccgacagaccctttgtg

SEQ ID NO: 1939 - DNA, 25 bp, Artificial Sequence
  Description of Artificial Sequence: Synthetic probe
accacgactccgacagaagtaactc

SEQ ID NO: 1940 - DNA, 25 bp, Artificial Sequence
  Description of Artificial Sequence: Synthetic probe
agaacacccgacacttaatgtgact

SEQ ID NO: 1941 - DNA, 25 bp, Artificial Sequence
  Description of Artificial Sequence: Synthetic probe
ctgtcctccgaccttttctactgga

SEQ ID NO: 1942 - skipped

SEQ ID NO: 1943 - DNA, 25 bp, Artificial Sequence
  Description of Artificial Sequence: Synthetic probe
agtccgtctcgcgaccgctctaaag

SEQ ID NO: 1944 - DNA, 25 bp, Artificial Sequence
  Description of Artificial Sequence: Synthetic probe
cgcgcgcctcgaccgccgcagcggc

SEQ ID NO: 1945 - DNA, 25 bp, Artificial Sequence
  Description of Artificial Sequence: Synthetic probe
gcaccgacacgcgacaagtagatta

SEQ ID NO: 1946 - DNA, 25 bp, Artificial Sequence
  Description of Artificial Sequence: Synthetic probe
gcctctgactcgacttgcctttcaa

SEQ ID NO: 1947 - DNA, 25 bp, Artificial Sequence
  Description of Artificial Sequence: Synthetic probe
tttgtcaccgactgacttaacccgg

SEQ ID NO: 1948 - DNA, 25 bp, Artificial Sequence
  Description of Artificial Sequence: Synthetic probe
acgacacacgatcgacacacatgcg

SEQ ID NO: 1949 - DNA, 25 bp, Artificial Sequence
  Description of Artificial Sequence: Synthetic probe
cctcgcgtgcgactgtgtaaattgc

SEQ ID NO: 1950 - DNA, 25 bp, Artificial Sequence
  Description of Artificial Sequence: Synthetic probe
catgtagaacgaccttttacgacgg

SEQ ID NO: 1951 - DNA, 25 bp, Artificial Sequence
  Description of Artificial Sequence: Synthetic probe
atgtcgcaccgactacgacgaggac

SEQ ID NO: 1952 - DNA, 25 bp, Artificial Sequence
  Description of Artificial Sequence: Synthetic probe
gtttaaccgacgacatagggcatct

SEQ ID NO: 1953 - DNA, 25 bp, Artificial Sequence
  Description of Artificial Sequence: Synthetic probe
gggtcacacacgacaccctgtctta

SEQ ID NO: 1954 - DNA, 25 bp, Artificial Sequence
  Description of Artificial Sequence: Synthetic probe
ggtgtgtgtcacgaccctgtgaatg

SEQ ID NO: 1955 - DNA, 25 bp, Artificial Sequence
  Description of Artificial Sequence: Synthetic probe
gacctacaccgacgaccgaagtaag

SEQ ID NO: 1956 - DNA, 25 bp, Artificial Sequence
  Description of Artificial Sequence: Synthetic probe
agacgctccgacgaccaaccgcaga

SEQ ID NO: 1957 - DNA, 25 bp, Artificial Sequence
  Description of Artificial Sequence: Synthetic probe
agccgacgaacgacactctactgtg

SEQ ID NO: 1958 - DNA, 25 bp, Artificial Sequence
  Description of Artificial Sequence: Synthetic probe
ttccgaccacgactctctcaatcgt

SEQ ID NO: 1959 - DNA, 25 bp, Artificial Sequence
  Description of Artificial Sequence: Synthetic probe
gctagctaccacgacacggtgtatt

SEQ ID NO: 1960 - DNA, 25 bp, Artificial Sequence
  Description of Artificial Sequence: Synthetic probe
cgttgcaccgacgaaccacaggagt

SEQ ID NO: 1961 - DNA, 25 bp, Artificial Sequence
  Description of Artificial Sequence: Synthetic probe
tcacgagcccgacgcacacggtctt

SEQ ID NO: 1962 - DNA, 25 bp, Artificial Sequence
  Description of Artificial Sequence: Synthetic probe
cgtatctacgacacgacgaagggag

SEQ ID NO: 1963 - DNA, 25 bp, Artificial Sequence
  Description of Artificial Sequence: Synthetic probe
ctactcccgacgacgttacaagtcg

SEQ ID NO: 1964 - DNA, 25 bp, Artificial Sequence
  Description of Artificial Sequence: Synthetic probe
ttacgtcacctcgacgcctctgagg

SEQ ID NO: 1965 - DNA, 25 bp, Artificial Sequence
  Description of Artificial Sequence: Synthetic probe
gttcgtgacaccgacgtataaggtt

SEQ ID NO: 1966 - DNA, 25 bp, Artificial Sequence
  Description of Artificial Sequence: Synthetic probe
cgtgtagtgtgtcgacgtgtacttg

SEQ ID NO: 1967 - DNA, 25 bp, Artificial Sequence
  Description of Artificial Sequence: Synthetic probe
agatcagttttttcgtgggtgtgcc

SEQ ID NO: 1968 - DNA, 25 bp, Artificial Sequence
  Description of Artificial Sequence: Synthetic probe
ctgggattttcgtgtgtgttcagac

SEQ ID NO: 1969 - DNA, 25 bp, Artificial Sequence
  Description of Artificial Sequence: Synthetic probe
aaaaattttagtacggacggtcggg

SEQ ID NO: 1970 - DNA, 25 bp, Artificial Sequence
  Description of Artificial Sequence: Synthetic probe
ctactagtgtattttgtctaaacgt

SEQ ID NO: 1971 - DNA, 25 bp, Artificial Sequence
  Description of Artificial Sequence: Synthetic probe
gtgtgtgtttttggtctactgttgt

SEQ ID NO: 1972 - DNA, 25 bp, Artificial Sequence
  Description of Artificial Sequence: Synthetic probe
attactcttttggtcggtcggtcct

SEQ ID NO: 1973 - DNA, 25 bp, Artificial Sequence
  Description of Artificial Sequence: Synthetic probe
actcgtggttttggtcggttagact

SEQ ID NO: 1974 - DNA, 25 bp, Artificial Sequence
  Description of Artificial Sequence: Synthetic probe
acgtgagtttttgtgcgtgcccgac

SEQ ID NO: 1975 - DNA, 25 bp, Artificial Sequence
  Description of Artificial Sequence: Synthetic probe
caagattttgtgtgggaagtcaccg

SEQ ID NO: 1976 - DNA, 25 bp, Artificial Sequence
  Description of Artificial Sequence: Synthetic probe
gaaagtgttttgtgtttcacgaaga

SEQ ID NO: 1977 - DNA, 25 bp, Artificial Sequence
  Description of Artificial Sequence: Synthetic probe
cattcttttgtgtgtaccggtccac

SEQ ID NO: 1978 - DNA, 25 bp, Artificial Sequence
  Description of Artificial Sequence: Synthetic probe
tgaaacatttggtggtggtgtaatc

SEQ ID NO: 1979 - DNA, 25 bp, Artificial Sequence
  Description of Artificial Sequence: Synthetic probe
agtcgggttttgttcgtcactgcca

SEQ ID NO: 1980 - DNA, 25 bp, Artificial Sequence
  Description of Artificial Sequence: Synthetic probe
acccaatttgtgtccgtgatgtcgg

SEQ ID NO: 1981 - DNA, 25 bp, Artificial Sequence
  Description of Artificial Sequence: Synthetic probe
ccttctatttgtgcgtcgtgcggaa

SEQ ID NO: 1982 - DNA, 25 bp, Artificial Sequence
  Description of Artificial Sequence: Synthetic probe
ttttgcttttggtgtgcgtcggcac

SEQ ID NO: 1983 - DNA, 25 bp, Artificial Sequence
  Description of Artificial Sequence: Synthetic probe
caagtcactttgtctcccttacttc

SEQ ID NO: 1984 - DNA, 25 bp, Artificial Sequence
  Description of Artificial Sequence: Synthetic probe
aggtctcgtctttggtttgtgagta

SEQ ID NO: 1985 - DNA, 25 bp, Artificial Sequence
  Description of Artificial Sequence: Synthetic probe
ctactaaatttctgtgtgtgaccac

SEQ ID NO: 1986 - DNA, 25 bp, Artificial Sequence
  Description of Artificial Sequence: Synthetic probe
aaatcctttcagagtccggtccgct

SEQ ID NO: 1987 - DNA, 25 bp, Artificial Sequence
  Description of Artificial Sequence: Synthetic probe
tacatgggttttcgcggttaggaca

SEQ ID NO: 1988 - DNA, 25 bp, Artificial Sequence
  Description of Artificial Sequence: Synthetic probe
tacggtcgggtttttggtcagcagt

SEQ ID NO: 1989 - DNA, 25 bp, Artificial Sequence
  Description of Artificial Sequence: Synthetic probe
gttgtcgtggttttcctggttcctt

SEQ ID NO: 1990 - DNA, 25 bp, Artificial Sequence
  Description of Artificial Sequence: Synthetic probe
actttcgtgtttgtgtcaggaagcg

SEQ ID NO: 1991 - DNA, 25 bp, Artificial Sequence
  Description of Artificial Sequence: Synthetic probe
gtaaatggtttgtgtctggtccgtg

SEQ ID NO: 1992 - DNA, 25 bp, Artificial Sequence
  Description of Artificial Sequence: Synthetic probe
attagggtttgtcgtccgttatatt

SEQ ID NO: 1993 - DNA, 25 bp, Artificial Sequence
  Description of Artificial Sequence: Synthetic probe
atgtcatgtttgttccgactcccag

SEQ ID NO: 1994 - DNA, 25 bp, Artificial Sequence
  Description of Artificial Sequence: Synthetic probe
gatggcgtcgtttgtctgcggtttt

SEQ ID NO: 1995 - DNA, 25 bp, Artificial Sequence
  Description of Artificial Sequence: Synthetic probe
gtcggtggtgttttcttcggcacat

SEQ ID NO: 1996 - DNA, 25 bp, Artificial Sequence
  Description of Artificial Sequence: Synthetic probe
atggtggtttgtgcctccctgtagg

SEQ ID NO: 1997 - DNA, 25 bp, Artificial Sequence
  Description of Artificial Sequence: Synthetic probe
aatccgtgtttgtggtttagtacga

SEQ ID NO: 1998 - DNA, 25 bp, Artificial Sequence
  Description of Artificial Sequence: Synthetic probe
aattactgtttgtggcgttaatgaa

SEQ ID NO: 1999 - DNA, 25 bp, Artificial Sequence
  Description of Artificial Sequence: Synthetic probe
aggtcctgtttgtgtgcttagaatc

SEQ ID NO: 2000 - DNA, 25 bp, Artificial Sequence
  Description of Artificial Sequence: Synthetic probe
caaacagtttgtgtgtccgatggac

SEQ ID NO: 2001 - DNA, 25 bp, Artificial Sequence
  Description of Artificial Sequence: Synthetic probe
gtcgtcgtggtgtttgtgctcatta

SEQ ID NO: 2002 - skipped

SEQ ID NO: 2003 - DNA, 25 bp, Artificial Sequence
  Description of Artificial Sequence: Synthetic probe
aggcagtgtttgtgtgtgccgtaaa

SEQ ID NO: 2004 - DNA, 25 bp, Artificial Sequence
  Description of Artificial Sequence: Synthetic probe
cgtgtgagtgtttgtcgactagacc

SEQ ID NO: 2005 - DNA, 25 bp, Artificial Sequence
  Description of Artificial Sequence: Synthetic probe
gctagtggcgtttgtagtcgtacct

SEQ ID NO: 2006 - DNA, 25 bp, Artificial Sequence
  Description of Artificial Sequence: Synthetic probe
tggtcggtgtttctcggtataaaca

SEQ ID NO: 2007 - DNA, 25 bp, Artificial Sequence
  Description of Artificial Sequence: Synthetic probe
tttactatacgtttgctgtgtgttt

SEQ ID NO: 2008 - DNA, 25 bp, Artificial Sequence
  Description of Artificial Sequence: Synthetic probe
aaagaagtttcgtcgtgtgtagtgg

SEQ ID NO: 2009 - DNA, 25 bp, Artificial Sequence
  Description of Artificial Sequence: Synthetic probe
gttattcttttaagtgtgtgtgagg

SEQ ID NO: 2010 - DNA, 25 bp, Artificial Sequence
  Description of Artificial Sequence: Synthetic probe
acggtcggtcgtttagggatctcaa

SEQ ID NO: 2011 - DNA, 25 bp, Artificial Sequence
  Description of Artificial Sequence: Synthetic probe
cgtgtggcgtttatactactggact

SEQ ID NO: 2012 - DNA, 25 bp, Artificial Sequence
  Description of Artificial Sequence: Synthetic probe
cgttcaacatttgtggtggtgtgag

SEQ ID NO: 2013 - DNA, 25 bp, Artificial Sequence
  Description of Artificial Sequence: Synthetic probe
tgtgaacacgtttagtgtggtgtgt

SEQ ID NO: 2014 - DNA, 25 bp, Artificial Sequence
  Description of Artificial Sequence: Synthetic probe
aaccaacatttgtggtggcgtagtg

SEQ ID NO: 2015 - DNA, 25 bp, Artificial Sequence
  Description of Artificial Sequence: Synthetic probe
atgaaacatttggtggtggtgtaat

SEQ ID NO: 2016 - DNA, 25 bp, Artificial Sequence
  Description of Artificial Sequence: Synthetic probe
acggacacgacattgttccaacctc

SEQ ID NO: 2017 - skipped

SEQ ID NO: 2018 - DNA, 25 bp, Artificial Sequence
  Description of Artificial Sequence: Synthetic probe
cctgggattttgtggtgtggactac

SEQ ID NO: 2019 - DNA, 25 bp, Artificial Sequence
  Description of Artificial Sequence: Synthetic probe
atcaaggattttgagttcccgtgcg

SEQ ID NO: 2020 - DNA, 25 bp, Artificial Sequence
  Description of Artificial Sequence: Synthetic probe
caccctacgatttgggaccgaccgg

SEQ ID NO: 2021 - DNA, 25 bp, Artificial Sequence
  Description of Artificial Sequence: Synthetic probe
gtcaccgctacattactttcaccag

SEQ ID NO: 2022 - DNA, 25 bp, Artificial Sequence
  Description of Artificial Sequence: Synthetic probe
cgttacgtcagattaccctttcggt

SEQ ID NO: 2023 - DNA, 25 bp, Artificial Sequence
  Description of Artificial Sequence: Synthetic probe
aagtgtgtgattagatgggtaagta

SEQ ID NO: 2024 - DNA, 25 bp, Artificial Sequence
  Description of Artificial Sequence: Synthetic probe
gctcccatattttcgtgtgtcgtgt

SEQ ID NO: 2025 - DNA, 25 bp, Artificial Sequence
  Description of Artificial Sequence: Synthetic probe
cgaacgtcctattgtgtgtgagatc

SEQ ID NO: 2026 - DNA, 25 bp, Artificial Sequence
  Description of Artificial Sequence: Synthetic probe
attcgacactattgggtggtggtaa

SEQ ID NO: 2027 - DNA, 25 bp, Artificial Sequence
  Description of Artificial Sequence: Synthetic probe
cgatgtagttattcgtgtgtggtca

SEQ ID NO: 2028 - DNA, 25 bp, Artificial Sequence
  Description of Artificial Sequence: Synthetic probe
acacacacggtattgactcgagcca

SEQ ID NO: 2029 - DNA, 25 bp, Artificial Sequence
  Description of Artificial Sequence: Synthetic probe
gcctttgttggtcctcgtgataagg

SEQ ID NO: 2030 - DNA, 25 bp, Artificial Sequence
  Description of Artificial Sequence: Synthetic probe
ctttatgttgcgtggttttgagcgc

SEQ ID NO: 2031 - DNA, 25 bp, Artificial Sequence
  Description of Artificial Sequence: Synthetic probe
ccctagtcttgggtgtgtggcaatt

SEQ ID NO: 2032 - DNA, 25 bp, Artificial Sequence
  Description of Artificial Sequence: Synthetic probe
aggggagttgtcgtgagaaaggtta

SEQ ID NO: 2033 - DNA, 25 bp, Artificial Sequence
  Description of Artificial Sequence: Synthetic probe
gtttggtttggttgtgacttacttg

SEQ ID NO: 2034 - DNA, 25 bp, Artificial Sequence
  Description of Artificial Sequence: Synthetic probe
acgtgtgtatttggaggtaggtatc

SEQ ID NO: 2035 - DNA, 25 bp, Artificial Sequence
  Description of Artificial Sequence: Synthetic probe
taagacatttgggttggtgtggacc

SEQ ID NO: 2036 - DNA, 25 bp, Artificial Sequence
  Description of Artificial Sequence: Synthetic probe
atttgtttggctccacactcgtacg

SEQ ID NO: 2037 - DNA, 25 bp, Artificial Sequence
  Description of Artificial Sequence: Synthetic probe
ccgaaattggtggtgttcgtggact

SEQ ID NO: 2038 - DNA, 25 bp, Artificial Sequence
  Description of Artificial Sequence: Synthetic probe
ctattcattggtcggtgtcctgcct

SEQ ID NO: 2039 - DNA, 25 bp, Artificial Sequence
  Description of Artificial Sequence: Synthetic probe
ctacactgtttggtctgttgcttct

SEQ ID NO: 2040 - DNA, 25 bp, Artificial Sequence
  Description of Artificial Sequence: Synthetic probe
ctcaacggttggttggccagcagtc

SEQ ID NO: 2041 - DNA, 25 bp, Artificial Sequence
  Description of Artificial Sequence: Synthetic probe
cctcggtttggtgtgtcctttcaga

SEQ ID NO: 2042 - DNA, 25 bp, Artificial Sequence
  Description of Artificial Sequence: Synthetic probe
ccgaagcttggcaccgacggtacac

SEQ ID NO: 2043 - DNA, 25 bp, Artificial Sequence
  Description of Artificial Sequence: Synthetic probe
gtagtgacgtctttggtgtgagtta

SEQ ID NO: 2044 - DNA, 25 bp, Artificial Sequence
  Description of Artificial Sequence: Synthetic probe
tccgacgccttggagaggactggtc

SEQ ID NO: 2045 - DNA, 25 bp, Artificial Sequence
  Description of Artificial Sequence: Synthetic probe
gtaagacctcttggcttcgagtcga

SEQ ID NO: 2046 - DNA, 25 bp, Artificial Sequence
  Description of Artificial Sequence: Synthetic probe
atagtatcacttggttttggtgtcg

SEQ ID NO: 2047 - DNA, 25 bp, Artificial Sequence
  Description of Artificial Sequence: Synthetic probe
ggggtctcttggtgtggtgacagac

SEQ ID NO: 2048 - DNA, 25 bp, Artificial Sequence
  Description of Artificial Sequence: Synthetic probe
aggtaactttgcatgtgtgtgggtc

SEQ ID NO: 2049 - DNA, 25 bp, Artificial Sequence
  Description of Artificial Sequence: Synthetic probe
gacaactccgttgcttggtgaagtc

SEQ ID NO: 2050 - DNA, 25 bp, Artificial Sequence
  Description of Artificial Sequence: Synthetic probe
caattttgcagtgtttccacgacga

SEQ ID NO: 2051 - DNA, 25 bp, Artificial Sequence
  Description of Artificial Sequence: Synthetic probe
caaatttgcgtgctgtgggtaactt

SEQ ID NO: 2052 - DNA, 25 bp, Artificial Sequence
  Description of Artificial Sequence: Synthetic probe
agtcaactacttgctcgatgagaaa

SEQ ID NO: 2053 - DNA, 25 bp, Artificial Sequence
  Description of Artificial Sequence: Synthetic probe
ttgccgtcttgcgtgcgaaccgcat

SEQ ID NO: 2054 - DNA, 25 bp, Artificial Sequence
  Description of Artificial Sequence: Synthetic probe
aggtctggttggtaaagaatatcag

SEQ ID NO: 2055 - DNA, 25 bp, Artificial Sequence
  Description of Artificial Sequence: Synthetic probe
ggaggagacttgcacacgcacacgc

SEQ ID NO: 2056 - DNA, 25 bp, Artificial Sequence
  Description of Artificial Sequence: Synthetic probe
atctcgtggttggtgaagttctttg

SEQ ID NO: 2057 - DNA, 25 bp, Artificial Sequence
  Description of Artificial Sequence: Synthetic probe
aaacccgttggtgtgtcagtagctg

SEQ ID NO: 2058 - DNA, 25 bp, Artificial Sequence
  Description of Artificial Sequence: Synthetic probe
ttctacggtgttggtgtggatccct

SEQ ID NO: 2059 - DNA, 25 bp, Artificial Sequence
  Description of Artificial Sequence: Synthetic probe
ctatcggtcgttggtgtgaagttct

SEQ ID NO: 2060 - DNA, 25 bp, Artificial Sequence
  Description of Artificial Sequence: Synthetic probe
gttctacggtgttggtgtggatccc

SEQ ID NO: 2061 - DNA, 25 bp, Artificial Sequence
  Description of Artificial Sequence: Synthetic probe
gttggttgttggttgtgctcacacc

SEQ ID NO: 2062 - DNA, 25 bp, Artificial Sequence
  Description of Artificial Sequence: Synthetic probe
gtcgttgaagttggtgggatatatt

SEQ ID NO: 2063 - DNA, 25 bp, Artificial Sequence
  Description of Artificial Sequence: Synthetic probe
acggacgtggttggtgtaaatccga

SEQ ID NO: 2064 - DNA, 25 bp, Artificial Sequence
  Description of Artificial Sequence: Synthetic probe
attctgcgttggtgtcctcctttga

SEQ ID NO: 2065 - DNA, 25 bp, Artificial Sequence
  Description of Artificial Sequence: Synthetic probe
cattgtgttggtggtggagaccctc

SEQ ID NO: 2066 - DNA, 25 bp, Artificial Sequence
  Description of Artificial Sequence: Synthetic probe
acgtcctgtgttggtagtaaccctt

SEQ ID NO: 2067 - DNA, 25 bp, Artificial Sequence
  Description of Artificial Sequence: Synthetic probe
caatcagttgggtgtgtgagtaacc

SEQ ID NO: 2068 - DNA, 25 bp, Artificial Sequence
  Description of Artificial Sequence: Synthetic probe
acctgtgtcgttggtggttccgtaa

SEQ ID NO: 2069 - DNA, 25 bp, Artificial Sequence
  Description of Artificial Sequence: Synthetic probe
gtccattgttgcgtgtgtctccatt

SEQ ID NO: 2070 - DNA, 25 bp, Artificial Sequence
  Description of Artificial Sequence: Synthetic probe
atgtgtgtttgaggtttcgtgattc

SEQ ID NO: 2071 - DNA, 25 bp, Artificial Sequence
  Description of Artificial Sequence: Synthetic probe
ttaagtctattgagtggtggtggaa

SEQ ID NO: 2072 - DNA, 25 bp, Artificial Sequence
  Description of Artificial Sequence: Synthetic probe
cacagggttgaaaaaaggtacacga

SEQ ID NO: 2073 - DNA, 25 bp, Artificial Sequence
  Description of Artificial Sequence: Synthetic probe
ttgtttttgacataggtggtggtga

SEQ ID NO: 2074 - DNA, 25 bp, Artificial Sequence
  Description of Artificial Sequence: Synthetic probe
acttcaacttgaccacacacacggt

SEQ ID NO: 2075 - DNA, 25 bp, Artificial Sequence
  Description of Artificial Sequence: Synthetic probe
catcactgttgaaccgccgacgacg

SEQ ID NO: 2076 - DNA, 25 bp, Artificial Sequence
  Description of Artificial Sequence: Synthetic probe
tccttgtcttgtgggtggaatcgag

SEQ ID NO: 2077 - DNA, 25 bp, Artificial Sequence
  Description of Artificial Sequence: Synthetic probe
atgttatgttgatgtcacgtttagt

SEQ ID NO: 2078 - DNA, 25 bp, Artificial Sequence
  Description of Artificial Sequence: Synthetic probe
gtaacgtgcgtttgttgctcaaccc

SEQ ID NO: 2079 - DNA, 25 bp, Artificial Sequence
  Description of Artificial Sequence: Synthetic probe
aataaattgtttgtgggtgtgtcgt

SEQ ID NO: 2080 - DNA, 25 bp, Artificial Sequence
  Description of Artificial Sequence: Synthetic probe
attatcattgtcaggtgtgtgtgtt

SEQ ID NO: 2081 - DNA, 25 bp, Artificial Sequence
  Description of Artificial Sequence: Synthetic probe
agatctcgattgtgtgtatccttcc

SEQ ID NO: 2082 - DNA, 25 bp, Artificial Sequence
  Description of Artificial Sequence: Synthetic probe
aagagtgtttgtgggctcgaaccga

SEQ ID NO: 2083 - DNA, 25 bp, Artificial Sequence
  Description of Artificial Sequence: Synthetic probe
catcatttgtggtggcgtgagtctc

SEQ ID NO: 2084 - DNA, 25 bp, Artificial Sequence
  Description of Artificial Sequence: Synthetic probe
aagagtgtttgtgtcgtccatccca

SEQ ID NO: 2085 - DNA, 25 bp, Artificial Sequence
  Description of Artificial Sequence: Synthetic probe
accagtcgtttgtgtggtgtcccag

SEQ ID NO: 2086 - DNA, 25 bp, Artificial Sequence
  Description of Artificial Sequence: Synthetic probe
ctaattattgtgcttgtgcggtccc

SEQ ID NO: 2087 - DNA, 25 bp, Artificial Sequence
  Description of Artificial Sequence: Synthetic probe
acctgagcttgtggtgatggtctac

SEQ ID NO: 2088 - DNA, 25 bp, Artificial Sequence
  Description of Artificial Sequence: Synthetic probe
agtgggacgttgtgtaagtcattcg

SEQ ID NO: 2089 - DNA, 25 bp, Artificial Sequence
  Description of Artificial Sequence: Synthetic probe
tcattgtttgtctgtgtgccctacc

SEQ ID NO: 2090 - DNA, 25 bp, Artificial Sequence
  Description of Artificial Sequence: Synthetic probe
gtgtgcgagtacttgttgtttacct

SEQ ID NO: 2091 - DNA, 25 bp, Artificial Sequence
  Description of Artificial Sequence: Synthetic probe
aagtcactttgtctcccttacttct

SEQ ID NO: 2092 - DNA, 25 bp, Artificial Sequence
  Description of Artificial Sequence: Synthetic probe
ctgaatttgtcgtgttgtccgagga

SEQ ID NO: 2093 - DNA, 25 bp, Artificial Sequence
  Description of Artificial Sequence: Synthetic probe
cttgtccttgtcgttgtgtgcccgt

SEQ ID NO: 2094 - DNA, 25 bp, Artificial Sequence
  Description of Artificial Sequence: Synthetic probe
ataatgtcgttgtgttctgtgccgc

SEQ ID NO: 2095 - DNA, 25 bp, Artificial Sequence
  Description of Artificial Sequence: Synthetic probe
gtcaaaggttgttgtggctagaagc

SEQ ID NO: 2096 - DNA, 25 bp, Artificial Sequence
  Description of Artificial Sequence: Synthetic probe
aactcgtgtcgttgttttgttatca

SEQ ID NO: 2097 - DNA, 25 bp, Artificial Sequence
  Description of Artificial Sequence: Synthetic probe
agacttggttgtgtgaacactttgt

SEQ ID NO: 2098 - DNA, 25 bp, Artificial Sequence
  Description of Artificial Sequence: Synthetic probe
ccacttgttgttgtcgttctgtctc

SEQ ID NO: 2099 - DNA, 25 bp, Artificial Sequence
  Description of Artificial Sequence: Synthetic probe
agttccgtgttgtgaggttggacac

SEQ ID NO: 2100 - DNA, 25 bp, Artificial Sequence
  Description of Artificial Sequence: Synthetic probe
ccagtggttgtgagtccgtcccttt

SEQ ID NO: 2101 - DNA, 25 bp, Artificial Sequence
  Description of Artificial Sequence: Synthetic probe
gcctgaggttgtggcaccggtactt

SEQ ID NO: 2102 - DNA, 25 bp, Artificial Sequence
  Description of Artificial Sequence: Synthetic probe
cgaggaccgttgtgtgtacgtcatt

SEQ ID NO: 2103 - DNA, 25 bp, Artificial Sequence
  Description of Artificial Sequence: Synthetic probe
aggtgtggttgtccttaccgtcccg

SEQ ID NO: 2104 - DNA, 25 bp, Artificial Sequence
  Description of Artificial Sequence: Synthetic probe
ttccaggttgtgtgttggcctcacc

SEQ ID NO: 2105 - DNA, 25 bp, Artificial Sequence
  Description of Artificial Sequence: Synthetic probe
cgtaatgtcgttgttggctcactct

SEQ ID NO: 2106 - DNA, 25 bp, Artificial Sequence
  Description of Artificial Sequence: Synthetic probe
actccgggttgtgttggtcaacgtc

SEQ ID NO: 2107 - DNA, 25 bp, Artificial Sequence
  Description of Artificial Sequence: Synthetic probe
gtatgtgtgtttgtaaggtatgtgt

SEQ ID NO: 2108 - DNA, 25 bp, Artificial Sequence
  Description of Artificial Sequence: Synthetic probe
tctatactaaatggtggtggtggga

SEQ ID NO: 2109 - DNA, 25 bp, Artificial Sequence
  Description of Artificial Sequence: Synthetic probe
ccacagacatgggtggtggtagtac

SEQ ID NO: 2110 - DNA, 25 bp, Artificial Sequence
  Description of Artificial Sequence: Synthetic probe
actgtggtcatggtggtgtactatc

SEQ ID NO: 2111 - DNA, 25 bp, Artificial Sequence
  Description of Artificial Sequence: Synthetic probe
ggtcagtgcatggtgtgtcgataca

SEQ ID NO: 2112 - DNA, 25 bp, Artificial Sequence
  Description of Artificial Sequence: Synthetic probe
agaggcagatggtggtgaaactttt

SEQ ID NO: 2113 - DNA, 25 bp, Artificial Sequence
  Description of Artificial Sequence: Synthetic probe
atcgacacacatgcgaacacacacg

SEQ ID NO: 2114 - DNA, 25 bp, Artificial Sequence
  Description of Artificial Sequence: Synthetic probe
attatgagatgcgatccgtaccacg

SEQ ID NO: 2115 - DNA, 25 bp, Artificial Sequence
  Description of Artificial Sequence: Synthetic probe
gtcacgacatgatggtggtggaaat

SEQ ID NO: 2116 - DNA, 25 bp, Artificial Sequence
  Description of Artificial Sequence: Synthetic probe
taaagcagatggtgtgtgacactgg

SEQ ID NO: 2117 - DNA, 25 bp, Artificial Sequence
  Description of Artificial Sequence: Synthetic probe
acatctctagatggaacgtgtgtgg

SEQ ID NO: 2118 - DNA, 25 bp, Artificial Sequence
  Description of Artificial Sequence: Synthetic probe
atttcgaatgactcgtgtgtggtac

SEQ ID NO: 2119 - DNA, 25 bp, Artificial Sequence
  Description of Artificial Sequence: Synthetic probe
cagtggtgatgatggtgacgtccca

SEQ ID NO: 2120 - DNA, 25 bp, Artificial Sequence
  Description of Artificial Sequence: Synthetic probe
ccatggtatgcgtgtgaagtatact

SEQ ID NO: 2121 - DNA, 25 bp, Artificial Sequence
  Description of Artificial Sequence: Synthetic probe
cgggtcgttatgtggtggtgccgaa

SEQ ID NO: 2122 - DNA, 25 bp, Artificial Sequence
  Description of Artificial Sequence: Synthetic probe
gtagtggtgtgtatggatgtttcat

SEQ ID NO: 2123 - DNA, 25 bp, Artificial Sequence
  Description of Artificial Sequence: Synthetic probe
ctcgtccctatggtggtggacaagt

SEQ ID NO: 2124 - DNA, 25 bp, Artificial Sequence
  Description of Artificial Sequence: Synthetic probe
ctgcagtagtatgcgctgttgtggc

SEQ ID NO: 2125 - DNA, 25 bp, Artificial Sequence
  Description of Artificial Sequence: Synthetic probe
gagggcctatgcgaccgacacgacc

SEQ ID NO: 2126 - DNA, 25 bp, Artificial Sequence
  Description of Artificial Sequence: Synthetic probe
agactgtcctatgctaccctgcgaa

SEQ ID NO: 2127 - DNA, 25 bp, Artificial Sequence
  Description of Artificial Sequence: Synthetic probe
ttctgtgtgtatggaatgtgtgtac

SEQ ID NO: 2128 - skipped

SEQ ID NO: 2129 - DNA, 25 bp, Artificial Sequence
  Description of Artificial Sequence: Synthetic probe
atgtgtgtgtatgcgacttttgccc

SEQ ID NO: 2130 - DNA, 25 bp, Artificial Sequence
  Description of Artificial Sequence: Synthetic probe
gtttgtgtgtatgccattcgagtca

SEQ ID NO: 2131 - DNA, 25 bp, Artificial Sequence
  Description of Artificial Sequence: Synthetic probe
gtgtgtatacatatgcgtgtgttca

SEQ ID NO: 2132 - skipped

SEQ ID NO: 2133 - DNA, 25 bp, Artificial Sequence
  Description of Artificial Sequence: Synthetic probe
atgttgaatgtgtgtgtgatgtcgt

SEQ ID NO: 2134 - DNA, 25 bp, Artificial Sequence
  Description of Artificial Sequence: Synthetic probe
gtgcgtgttcatgtgtttctgtgtc

SEQ ID NO: 2135 - DNA, 25 bp, Artificial Sequence
  Description of Artificial Sequence: Synthetic probe
tcttgatcatgtgtcggtggttccg

SEQ ID NO: 2136 - DNA, 25 bp, Artificial Sequence
  Description of Artificial Sequence: Synthetic probe
tcccatcatgtggagtgtgtacgtg

SEQ ID NO: 2137 - DNA, 25 bp, Artificial Sequence
  Description of Artificial Sequence: Synthetic probe
attggtaatgtgtgtgtcgtgactc

SEQ ID NO: 2138 - DNA, 25 bp, Artificial Sequence
  Description of Artificial Sequence: Synthetic probe
gtagtagtaagacatgtgtgtgttc

SEQ ID NO: 2139 - DNA, 25 bp, Artificial Sequence
  Description of Artificial Sequence: Synthetic probe
cggactgagatgttgtgtggatata

SEQ ID NO: 2140 - DNA, 25 bp, Artificial Sequence
  Description of Artificial Sequence: Synthetic probe
gtacacacacgtcatgtcccgacag

SEQ ID NO: 2141 - DNA, 25 bp, Artificial Sequence
  Description of Artificial Sequence: Synthetic probe
acacacacagatgtatgacacacac

SEQ ID NO: 2142 - DNA, 25 bp, Artificial Sequence
  Description of Artificial Sequence: Synthetic probe
ctatagggtatgtccttcggcggat

SEQ ID NO: 2143 - DNA, 25 bp, Artificial Sequence
  Description of Artificial Sequence: Synthetic probe
atctggttatgttgtgtgggtttaa

SEQ ID NO: 2144 - DNA, 25 bp, Artificial Sequence
  Description of Artificial Sequence: Synthetic probe
cacacacacatgtatcgtaaggata

SEQ ID NO: 2145 - DNA, 25 bp, Artificial Sequence
  Description of Artificial Sequence: Synthetic probe
attcttctatgtgtgggtgttacag

SEQ ID NO: 2146 - skipped

SEQ ID NO: 2147 - DNA, 25 bp, Artificial Sequence
  Description of Artificial Sequence: Synthetic probe
ccaccatatgtgtcgtgtcttgata

SEQ ID NO: 2148 - DNA, 25 bp, Artificial Sequence
  Description of Artificial Sequence: Synthetic probe
tgtataaggtatgtgtgtgtaaggt

SEQ ID NO: 2149 - DNA, 25 bp, Artificial Sequence
  Description of Artificial Sequence: Synthetic probe
attgtccgtatgtgttttgggtggt

SEQ ID NO: 2150 - DNA, 25 bp, Artificial Sequence
  Description of Artificial Sequence: Synthetic probe
ctgtgtggtatgtagtagcgacttc

SEQ ID NO: 2151 - DNA, 25 bp, Artificial Sequence
  Description of Artificial Sequence: Synthetic probe
gtagagaccctatgtgtcccgtggt

SEQ ID NO: 2152 - DNA, 25 bp, Artificial Sequence
  Description of Artificial Sequence: Synthetic probe
acagtgccgtatgtggtttgtccta

SEQ ID NO: 2153 - DNA, 25 bp, Artificial Sequence
  Description of Artificial Sequence: Synthetic probe
acgtccacctcttctataaaaaatc

SEQ ID NO: 2154 - DNA, 25 bp, Artificial Sequence
  Description of Artificial Sequence: Synthetic probe
ggtgatacccttttagacggtgaca

SEQ ID NO: 2155 - DNA, 25 bp, Artificial Sequence
  Description of Artificial Sequence: Synthetic probe
ttaccaacctttgttgtgtctgtcc

SEQ ID NO: 2156 - DNA, 25 bp, Artificial Sequence
  Description of Artificial Sequence: Synthetic probe
atgagtcgtacctttgttctacttt

SEQ ID NO: 2157 - DNA, 25 bp, Artificial Sequence
  Description of Artificial Sequence: Synthetic probe
ttaatcccttgagacatcttgtccg

SEQ ID NO: 2158 - DNA, 25 bp, Artificial Sequence
  Description of Artificial Sequence: Synthetic probe
ctacgactactacctttgtgtacct

SEQ ID NO: 2159 - DNA, 25 bp, Artificial Sequence
  Description of Artificial Sequence: Synthetic probe
cggtcacaccttcgtgtgtgtcgtt

SEQ ID NO: 2160 - DNA, 25 bp, Artificial Sequence
  Description of Artificial Sequence: Synthetic probe
aaaactgcttgtgggtcgttcgtca

SEQ ID NO: 2161 - DNA, 25 bp, Artificial Sequence
  Description of Artificial Sequence: Synthetic probe
ccatcgtgcttgtggtggcgtctgt

SEQ ID NO: 2162 - DNA, 25 bp, Artificial Sequence
  Description of Artificial Sequence: Synthetic probe
tcgtgtgcggcttgcccttctgcgc

SEQ ID NO: 2163 - DNA, 25 bp, Artificial Sequence
  Description of Artificial Sequence: Synthetic probe
ccttgtgcttggtgtgtaggcacac

SEQ ID NO: 2164 - DNA, 25 bp, Artificial Sequence
  Description of Artificial Sequence: Synthetic probe
tctctactcggcttgtgtgtgtcag

SEQ ID NO: 2165 - DNA, 25 bp, Artificial Sequence
  Description of Artificial Sequence: Synthetic probe
agtgaggtacgcttgtgtaggatct

SEQ ID NO: 2166 - DNA, 25 bp, Artificial Sequence
  Description of Artificial Sequence: Synthetic probe
taagtgtgtgcttgagtgagtaagt

SEQ ID NO: 2167 - DNA, 25 bp, Artificial Sequence
  Description of Artificial Sequence: Synthetic probe
aaaactaccttatcctcggcggtga

SEQ ID NO: 2168 - DNA, 25 bp, Artificial Sequence
  Description of Artificial Sequence: Synthetic probe
accgctcgccttaccttatgtgtag

SEQ ID NO: 2169 - DNA, 25 bp, Artificial Sequence
  Description of Artificial Sequence: Synthetic probe
agtccgtatccttacttcccgtggg

SEQ ID NO: 2170 - DNA, 25 bp, Artificial Sequence
  Description of Artificial Sequence: Synthetic probe
ctagtggttcttgtggttcttgtcc

SEQ ID NO: 2171 - DNA, 25 bp, Artificial Sequence
  Description of Artificial Sequence: Synthetic probe
caaattctttgtgggtcggtgtcga

SEQ ID NO: 2172 - DNA, 25 bp, Artificial Sequence
  Description of Artificial Sequence: Synthetic probe
gaaaacctcttgtgtgtggggactg

SEQ ID NO: 2173 - DNA, 25 bp, Artificial Sequence
  Description of Artificial Sequence: Synthetic probe
gattaccgttcttgttgttgatgaa

SEQ ID NO: 2174 - DNA, 25 bp, Artificial Sequence
  Description of Artificial Sequence: Synthetic probe
acgagtctcttcttgtgtgtgccga

SEQ ID NO: 2175 - DNA, 25 bp, Artificial Sequence
  Description of Artificial Sequence: Synthetic probe
aacacaagtctttgggtccgggttg

SEQ ID NO: 2176 - DNA, 25 bp, Artificial Sequence
  Description of Artificial Sequence: Synthetic probe
ctgaccgatcttcgtttgacaatag

SEQ ID NO: 2177 - DNA, 25 bp, Artificial Sequence
  Description of Artificial Sequence: Synthetic probe
gtctcgccctcttctggagtccatg

SEQ ID NO: 2178 - DNA, 25 bp, Artificial Sequence
  Description of Artificial Sequence: Synthetic probe
aaaactctcttcgtgtggagtgagt

SEQ ID NO: 2179 - DNA, 25 bp, Artificial Sequence
  Description of Artificial Sequence: Synthetic probe
cctttgtcttgtcgggtatggttct

SEQ ID NO: 2180 - DNA, 25 bp, Artificial Sequence
  Description of Artificial Sequence: Synthetic probe
gtgtgtgtctagtcttgttccgccc

SEQ ID NO: 2181 - DNA, 25 bp, Artificial Sequence
  Description of Artificial Sequence: Synthetic probe
ctacctttcttaggtgttgtgcgga

SEQ ID NO: 2182 - DNA, 25 bp, Artificial Sequence
  Description of Artificial Sequence: Synthetic probe
taaaaaacttgtggtgcttagacac

SEQ ID NO: 2183 - DNA, 25 bp, Artificial Sequence
  Description of Artificial Sequence: Synthetic probe
taccacacacactttgagtttaaat

SEQ ID NO: 2184 - skipped

SEQ ID NO: 2185 - DNA, 25 bp, Artificial Sequence
  Description of Artificial Sequence: Synthetic probe
cgtcaccacgacttcgatatcggtt

SEQ ID NO: 2186 - DNA, 25 bp, Artificial Sequence
  Description of Artificial Sequence: Synthetic probe
ggtcgtgcgtgacttgagttaaaac

SEQ ID NO: 2187 - DNA, 25 bp, Artificial Sequence
  Description of Artificial Sequence: Synthetic probe
ctgttatgacttctgtgtgtttgga

SEQ ID NO: 2188 - DNA, 25 bp, Artificial Sequence
  Description of Artificial Sequence: Synthetic probe
gtcgaaccgaacttagcgaaggtct

SEQ ID NO: 2189 - DNA, 25 bp, Artificial Sequence
  Description of Artificial Sequence: Synthetic probe
tagtcgtgcgtatacttgatacttt

SEQ ID NO: 2190 - DNA, 25 bp, Artificial Sequence
  Description of Artificial Sequence: Synthetic probe
accgaatcctggtgggtcggcaccc

SEQ ID NO: 2191 - DNA, 25 bp, Artificial Sequence
  Description of Artificial Sequence: Synthetic probe
gccggcgcctgcctctaatgcagtg

SEQ ID NO: 2192 - DNA, 25 bp, Artificial Sequence
  Description of Artificial Sequence: Synthetic probe
ctcacttcgctggtgcgtggacgaa

SEQ ID NO: 2193 - DNA, 25 bp, Artificial Sequence
  Description of Artificial Sequence: Synthetic probe
tttgtgcctggtgtctcgcattaga

SEQ ID NO: 2194 - DNA, 25 bp, Artificial Sequence
  Description of Artificial Sequence: Synthetic probe
caaaggctggtctgtgtcagtgact

SEQ ID NO: 2195 - DNA, 25 bp, Artificial Sequence
  Description of Artificial Sequence: Synthetic probe
aacgggtcgctggttgacactggta

SEQ ID NO: 2196 - DNA, 25 bp, Artificial Sequence
  Description of Artificial Sequence: Synthetic probe
cctccagctgggtgcggtgtgcagc

SEQ ID NO: 2197 - DNA, 25 bp, Artificial Sequence
  Description of Artificial Sequence: Synthetic probe
tctgagtgtgctggtggagtctact

SEQ ID NO: 2198 - DNA, 25 bp, Artificial Sequence
  Description of Artificial Sequence: Synthetic probe
cactctgtgctggtgtgttgtccgt

SEQ ID NO: 2199 - DNA, 25 bp, Artificial Sequence
  Description of Artificial Sequence: Synthetic probe
cgtgtggcgctggtcgtgcgccagc

SEQ ID NO: 2200 - DNA, 25 bp, Artificial Sequence
  Description of Artificial Sequence: Synthetic probe
cgcgtgtgacctgcgtgtgccctgc

SEQ ID NO: 2201 - DNA, 25 bp, Artificial Sequence
  Description of Artificial Sequence: Synthetic probe
atatattgctgatgccgtgtgtgcg

SEQ ID NO: 2202 - skipped

SEQ ID NO: 2203 - DNA, 25 bp, Artificial Sequence
  Description of Artificial Sequence: Synthetic probe
ttcaccctctgcaaaccgatcgtgg

SEQ ID NO: 2204 - DNA, 25 bp, Artificial Sequence
  Description of Artificial Sequence: Synthetic probe
ctttagttctggtttggtgtgccac

SEQ ID NO: 2205 - DNA, 25 bp, Artificial Sequence
  Description of Artificial Sequence: Synthetic probe
tccaacttctgcgtgtgtcgactcc

SEQ ID NO: 2206 - DNA, 25 bp, Artificial Sequence
  Description of Artificial Sequence: Synthetic probe
ctgctacgttctgccacctggacga

SEQ ID NO: 2207 - DNA, 25 bp, Artificial Sequence
  Description of Artificial Sequence: Synthetic probe
tcgtgtggctctgcgaggtagtccc

SEQ ID NO: 2208 - DNA, 25 bp, Artificial Sequence
  Description of Artificial Sequence: Synthetic probe
gtagcctgtgtctgcggaatcccta

SEQ ID NO: 2209 - DNA, 25 bp, Artificial Sequence
  Description of Artificial Sequence: Synthetic probe
acagaggtgtctggtggtaccgtat

SEQ ID NO: 2210 - DNA, 25 bp, Artificial Sequence
  Description of Artificial Sequence: Synthetic probe
tcgcctaggtctgcgcgtgtggtcc

SEQ ID NO: 2211 - DNA, 25 bp, Artificial Sequence
  Description of Artificial Sequence: Synthetic probe
ggagaccctctgaccctgaaacaga

SEQ ID NO: 2212 - skipped

SEQ ID NO: 2213 - DNA, 25 bp, Artificial Sequence
  Description of Artificial Sequence: Synthetic probe
ctcaggtcctgtggcggaacctacc

SEQ ID NO: 2214 - DNA, 25 bp, Artificial Sequence
  Description of Artificial Sequence: Synthetic probe
cttcggcctgtgtgtgaataacgtc

SEQ ID NO: 2215 - DNA, 25 bp, Artificial Sequence
  Description of Artificial Sequence: Synthetic probe
aagttctgctgtggtggtttacacc

SEQ ID NO: 2216 - DNA, 25 bp, Artificial Sequence
  Description of Artificial Sequence: Synthetic probe
actgtttcctgtggtggttctcctc

SEQ ID NO: 2217 - DNA, 25 bp, Artificial Sequence
  Description of Artificial Sequence: Synthetic probe
gtgtgtgccctgtttcgagaaggtc

SEQ ID NO: 2218 - DNA, 25 bp, Artificial Sequence
  Description of Artificial Sequence: Synthetic probe
aggtgtgcctgtgcatctactactg

SEQ ID NO: 2219 - DNA, 25 bp, Artificial Sequence
  Description of Artificial Sequence: Synthetic probe
atcgtgtgcctgtgctatacctgcc

SEQ ID NO: 2220 - DNA, 25 bp, Artificial Sequence
  Description of Artificial Sequence: Synthetic probe
agtcccgacctgtgtgtgtcgaagg

SEQ ID NO: 2221 - DNA, 25 bp, Artificial Sequence
  Description of Artificial Sequence: Synthetic probe
aggtactagtcctgtgagtgtgcgt

SEQ ID NO: 2222 - DNA, 25 bp, Artificial Sequence
  Description of Artificial Sequence: Synthetic probe
tcgtgtgtccctgtgtcgttgatct

SEQ ID NO: 2223 - DNA, 25 bp, Artificial Sequence
  Description of Artificial Sequence: Synthetic probe
cctttcctgtgtgtcagggtcccgt

SEQ ID NO: 2224 - DNA, 25 bp, Artificial Sequence
  Description of Artificial Sequence: Synthetic probe
gtcttggcctgtgttggtcgacact

SEQ ID NO: 2225 - DNA, 25 bp, Artificial Sequence
  Description of Artificial Sequence: Synthetic probe
gtggtggtgtctgtgctccctccag

SEQ ID NO: 2226 - DNA, 25 bp, Artificial Sequence
  Description of Artificial Sequence: Synthetic probe
attgtatatctgtttgcgtgtggcc

SEQ ID NO: 2227 - DNA, 25 bp, Artificial Sequence
  Description of Artificial Sequence: Synthetic probe
gccctggctgtgtctgcgcctgtcg

SEQ ID NO: 2228 - DNA, 25 bp, Artificial Sequence
  Description of Artificial Sequence: Synthetic probe
tttcatcgtctgttgtgtgaggtcc

SEQ ID NO: 2229 - DNA, 25 bp, Artificial Sequence
  Description of Artificial Sequence: Synthetic probe
acattcagtctgtgtggtgaatccc

SEQ ID NO: 2230 - DNA, 25 bp, Artificial Sequence
  Description of Artificial Sequence: Synthetic probe
agcagattctgtgctgtgtgaccga

SEQ ID NO: 2231 - DNA, 25 bp, Artificial Sequence
  Description of Artificial Sequence: Synthetic probe
agaccctactctgtgtgtgcccaac

SEQ ID NO: 2232 - DNA, 25 bp, Artificial Sequence
  Description of Artificial Sequence: Synthetic probe
cattgtctctgtggtgtatcgtcac

SEQ ID NO: 2233 - DNA, 25 bp, Artificial Sequence
  Description of Artificial Sequence: Synthetic probe
ctcagtgtgtctgttctggttcctc

SEQ ID NO: 2234 - DNA, 25 bp, Artificial Sequence
  Description of Artificial Sequence: Synthetic probe
acgagcggtgtctgtgttaagttca

SEQ ID NO: 2235 - DNA, 25 bp, Artificial Sequence
  Description of Artificial Sequence: Synthetic probe
gtcgcgcgtcctctgtgtgagtgcc

SEQ ID NO: 2236 - DNA, 25 bp, Artificial Sequence
  Description of Artificial Sequence: Synthetic probe
agtgtcgactatctgtcgcttcgga

SEQ ID NO: 2237 - DNA, 25 bp, Artificial Sequence
  Description of Artificial Sequence: Synthetic probe
aacagcttctgtcggtgtcgtgtca

SEQ ID NO: 2238 - DNA, 25 bp, Artificial Sequence
  Description of Artificial Sequence: Synthetic probe
ataaatgtctgtgcgggtgacaccc

SEQ ID NO: 2239 - DNA, 25 bp, Artificial Sequence
  Description of Artificial Sequence: Synthetic probe
cgtcaccggtctgtgtggacaaccc

SEQ ID NO: 2240 - DNA, 25 bp, Artificial Sequence
  Description of Artificial Sequence: Synthetic probe
atgggtgtctgtgtgccgctcacca

SEQ ID NO: 2241 - DNA, 25 bp, Artificial Sequence
  Description of Artificial Sequence: Synthetic probe
acaagtcgtgtctgtggtgcctcag

SEQ ID NO: 2242 - DNA, 25 bp, Artificial Sequence
  Description of Artificial Sequence: Synthetic probe
gtcctagataactggtgtgtgaatt

SEQ ID NO: 2243 - DNA, 25 bp, Artificial Sequence
  Description of Artificial Sequence: Synthetic probe
cttcataactgtgtggttggggcac

SEQ ID NO: 2244 - DNA, 25 bp, Artificial Sequence
  Description of Artificial Sequence: Synthetic probe
atgtacgttcactgtggtgtgaatg

SEQ ID NO: 2245 - DNA, 25 bp, Artificial Sequence
  Description of Artificial Sequence: Synthetic probe
cggttgtgactgtggtttaaaaact

SEQ ID NO: 2246 - DNA, 25 bp, Artificial Sequence
  Description of Artificial Sequence: Synthetic probe
gaacattgactgtgtgtgtagttcc

SEQ ID NO: 2247 - DNA, 25 bp, Artificial Sequence
  Description of Artificial Sequence: Synthetic probe
agtttgtgcgtgcacttgtgggtca

SEQ ID NO: 2248 - DNA, 25 bp, Artificial Sequence
  Description of Artificial Sequence: Synthetic probe
actttcattcccgtttttagcgtta

SEQ ID NO: 2249 - DNA, 25 bp, Artificial Sequence
  Description of Artificial Sequence: Synthetic probe
aggtgagtttcctgcgtgtgtccac

SEQ ID NO: 2250 - DNA, 25 bp, Artificial Sequence
  Description of Artificial Sequence: Synthetic probe
ttaatatttccttcggtggtggtcc

SEQ ID NO: 2251 - DNA, 25 bp, Artificial Sequence
  Description of Artificial Sequence: Synthetic probe
acttttttccgaagagtgtgggtgc

SEQ ID NO: 2252 - DNA, 25 bp, Artificial Sequence
  Description of Artificial Sequence: Synthetic probe
tcctctgcttcctcggtactactga

SEQ ID NO: 2253 - DNA, 25 bp, Artificial Sequence
  Description of Artificial Sequence: Synthetic probe
cgaagtccttcctgtgtgtgtctca

SEQ ID NO: 2254 - DNA, 25 bp, Artificial Sequence
  Description of Artificial Sequence: Synthetic probe
ggtcctaccgttcccgagaggactt

SEQ ID NO: 2255 - DNA, 25 bp, Artificial Sequence
  Description of Artificial Sequence: Synthetic probe
actagtgtgtgttcctcaagaaagg

SEQ ID NO: 2256 - DNA, 25 bp, Artificial Sequence
  Description of Artificial Sequence: Synthetic probe
tccgacctcgttcctcgtccagcag

SEQ ID NO: 2257 - DNA, 25 bp, Artificial Sequence
  Description of Artificial Sequence: Synthetic probe
cccttattcaggtgtgtgttgccac

SEQ ID NO: 2258 - skipped

SEQ ID NO: 2259 - DNA, 25 bp, Artificial Sequence
  Description of Artificial Sequence: Synthetic probe
accacaggttcaaggcagtttctag

SEQ ID NO: 2260 - DNA, 25 bp, Artificial Sequence
  Description of Artificial Sequence: Synthetic probe
cctttttctgtctgcgtgtcgaccc

SEQ ID NO: 2261 - DNA, 25 bp, Artificial Sequence
  Description of Artificial Sequence: Synthetic probe
acgacaaccttctgtgtgtagtact

SEQ ID NO: 2262 - DNA, 25 bp, Artificial Sequence
  Description of Artificial Sequence: Synthetic probe
actcgcgtcattctgttgttgtttt

SEQ ID NO: 2263 - DNA, 25 bp, Artificial Sequence
  Description of Artificial Sequence: Synthetic probe
accaagtcttctgtttttgaggaag

SEQ ID NO: 2264 - DNA, 25 bp, Artificial Sequence
  Description of Artificial Sequence: Synthetic probe
ctgacttttctcgtccgtgtgtacc

SEQ ID NO: 2265 - DNA, 25 bp, Artificial Sequence
  Description of Artificial Sequence: Synthetic probe
gacgccgaccttctctctcccgcag

SEQ ID NO: 2266 - DNA, 25 bp, Artificial Sequence
  Description of Artificial Sequence: Synthetic probe
agtgcgtgtcgttctgcgttttgca

SEQ ID NO: 2267 - DNA, 25 bp, Artificial Sequence
  Description of Artificial Sequence: Synthetic probe
tccctctgttctgtgcgtgcctcgg

SEQ ID NO: 2268 - DNA, 25 bp, Artificial Sequence
  Description of Artificial Sequence: Synthetic probe
ttcgacacgacttctattttgatct

SEQ ID NO: 2269 - DNA, 25 bp, Artificial Sequence
  Description of Artificial Sequence: Synthetic probe
cgagtagacaatccgattcagggtc

SEQ ID NO: 2270 - DNA, 25 bp, Artificial Sequence
  Description of Artificial Sequence: Synthetic probe
acgccgccttatgcaaggtttaatc

SEQ ID NO: 2271 - DNA, 25 bp, Artificial Sequence
  Description of Artificial Sequence: Synthetic probe
ctaaaacatccacgcacacgacggt

SEQ ID NO: 2272 - DNA, 25 bp, Artificial Sequence
  Description of Artificial Sequence: Synthetic probe
ctggttaatcgacgtttgtggtggc

SEQ ID NO: 2273 - DNA, 25 bp, Artificial Sequence
  Description of Artificial Sequence: Synthetic probe
ctatgacgacgatccgaagtttcct

SEQ ID NO: 2274 - DNA, 25 bp, Artificial Sequence
  Description of Artificial Sequence: Synthetic probe
ccgacgaccatcaggacgagagtcc

SEQ ID NO: 2275 - DNA, 25 bp, Artificial Sequence
  Description of Artificial Sequence: Synthetic probe
atgaattatcctctctgtccggacg

SEQ ID NO: 2276 - DNA, 25 bp, Artificial Sequence
  Description of Artificial Sequence: Synthetic probe
cgacgggaatctttcgtgtgtgagt

SEQ ID NO: 2277 - DNA, 25 bp, Artificial Sequence
  Description of Artificial Sequence: Synthetic probe
ggaatatcatctgtgtgccgtggag

SEQ ID NO: 2278 - DNA, 25 bp, Artificial Sequence
  Description of Artificial Sequence: Synthetic probe
atgtaaacatctaaaaaaggggtct

SEQ ID NO: 2279 - DNA, 25 bp, Artificial Sequence
  Description of Artificial Sequence: Synthetic probe
gtgtgtccgtcatctttccgtgaga

SEQ ID NO: 2280 - DNA, 25 bp, Artificial Sequence
  Description of Artificial Sequence: Synthetic probe
acggtccagatctttgtgtgtgcac

SEQ ID NO: 2281 - DNA, 25 bp, Artificial Sequence
  Description of Artificial Sequence: Synthetic probe
gttcccactatctactcccagtagt

SEQ ID NO: 2282 - DNA, 25 bp, Artificial Sequence
  Description of Artificial Sequence: Synthetic probe
ttgtgactcgtatctgtatcggaga

SEQ ID NO: 2283 - DNA, 25 bp, Artificial Sequence
  Description of Artificial Sequence: Synthetic probe
gtatttatttcgcttgtgtggttcc

SEQ ID NO: 2284 - DNA, 25 bp, Artificial Sequence
  Description of Artificial Sequence: Synthetic probe
ctgtacgtcgagtatctgcgtgcgt

SEQ ID NO: 2285 - DNA, 25 bp, Artificial Sequence
  Description of Artificial Sequence: Synthetic probe
tcagtgtcgtgttcggtggtggctt

SEQ ID NO: 2286 - DNA, 25 bp, Artificial Sequence
  Description of Artificial Sequence: Synthetic probe
ggtttcgattcgaccgacccatggt

SEQ ID NO: 2287 - DNA, 25 bp, Artificial Sequence
  Description of Artificial Sequence: Synthetic probe
caatctttcggttgcgtgtgtccct

SEQ ID NO: 2288 - DNA, 25 bp, Artificial Sequence
  Description of Artificial Sequence: Synthetic probe
tatttatttcgcttgtgtggttcct

SEQ ID NO: 2289 - DNA, 25 bp, Artificial Sequence
  Description of Artificial Sequence: Synthetic probe
ctcacatttcgttgtgtgggtcccg

SEQ ID NO: 2290 - DNA, 25 bp, Artificial Sequence
  Description of Artificial Sequence: Synthetic probe
gagtgtggattcgtatttttggatt

SEQ ID NO: 2291 - DNA, 25 bp, Artificial Sequence
  Description of Artificial Sequence: Synthetic probe
attatagagttcgtgttcgtgtcgt

SEQ ID NO: 2292 - DNA, 25 bp, Artificial Sequence
  Description of Artificial Sequence: Synthetic probe
tacgtgtatatacgttcgtgtgtgt

SEQ ID NO: 2293 - DNA, 25 bp, Artificial Sequence
  Description of Artificial Sequence: Synthetic probe
gttttcacatcgaaccgaaccgtcg

SEQ ID NO: 2294 - DNA, 25 bp, Artificial Sequence
  Description of Artificial Sequence: Synthetic probe
cttaacatatcggtctgtgtcggtg

SEQ ID NO: 2295 - DNA, 25 bp, Artificial Sequence
  Description of Artificial Sequence: Synthetic probe
ataatgctatcggtgagtgtgccgc

SEQ ID NO: 2296 - DNA, 25 bp, Artificial Sequence
  Description of Artificial Sequence: Synthetic probe
tagaggttcatcgtggtgtgccatc

SEQ ID NO: 2297 - DNA, 25 bp, Artificial Sequence
  Description of Artificial Sequence: Synthetic probe
gtaaaaaatcgttcgtctgccggtg

SEQ ID NO: 2298 - DNA, 25 bp, Artificial Sequence
  Description of Artificial Sequence: Synthetic probe
cgtttcgtcgtatcgttgttagcac

SEQ ID NO: 2299 - DNA, 25 bp, Artificial Sequence
  Description of Artificial Sequence: Synthetic probe
tgtcgtcgggatcgtatgtctatgc

SEQ ID NO: 2300 - DNA, 25 bp, Artificial Sequence
  Description of Artificial Sequence: Synthetic probe
cttctcggatcgtgtgtgtcagtca

SEQ ID NO: 2301 - DNA, 25 bp, Artificial Sequence
  Description of Artificial Sequence: Synthetic probe
ttccctcctcctcgtttaataacta

SEQ ID NO: 2302 - DNA, 25 bp, Artificial Sequence
  Description of Artificial Sequence: Synthetic probe
ctcacgactcctccttgaaagggga

SEQ ID NO: 2303 - DNA, 25 bp, Artificial Sequence
  Description of Artificial Sequence: Synthetic probe
gatatatcgtcctcccgacgacgca

SEQ ID NO: 2304 - DNA, 25 bp, Artificial Sequence
  Description of Artificial Sequence: Synthetic probe
gggatccctcctacctacgtgacgg

SEQ ID NO: 2305 - skipped

SEQ ID NO: 2306 - DNA, 25 bp, Artificial Sequence
  Description of Artificial Sequence: Synthetic probe
ggttgttagctcagaggttgtcgtt

SEQ ID NO: 2307 - DNA, 25 bp, Artificial Sequence
  Description of Artificial Sequence: Synthetic probe
gacgctgccgtctccctgcagtggt

SEQ ID NO: 2308 - DNA, 25 bp, Artificial Sequence
  Description of Artificial Sequence: Synthetic probe
ccggcacctcacaggggaaggtcgt

SEQ ID NO: 2309 - DNA, 25 bp, Artificial Sequence
  Description of Artificial Sequence: Synthetic probe
acctcctcctcactcgtccagggtt

SEQ ID NO: 2310 - DNA, 25 bp, Artificial Sequence
  Description of Artificial Sequence: Synthetic probe
atttgttctccgattagactgtttt

SEQ ID NO: 2311 - DNA, 25 bp, Artificial Sequence
  Description of Artificial Sequence: Synthetic probe
cttctcctctccctgtgtgtgtgtg

SEQ ID NO: 2312 - DNA, 25 bp, Artificial Sequence
  Description of Artificial Sequence: Synthetic probe
atcccggtctccagacagacggtct

SEQ ID NO: 2313 - DNA, 25 bp, Artificial Sequence
  Description of Artificial Sequence: Synthetic probe
atcatacttctcacacgcacgggtt

SEQ ID NO: 2314 - DNA, 25 bp, Artificial Sequence
  Description of Artificial Sequence: Synthetic probe
cgtgcgtgtgtctcctgaccgtaga

SEQ ID NO: 2315 - DNA, 25 bp, Artificial Sequence
  Description of Artificial Sequence: Synthetic probe
cggtcctcgtctcattgtcagtttt

SEQ ID NO: 2316 - DNA, 25 bp, Artificial Sequence
  Description of Artificial Sequence: Synthetic probe
agagggcctcttcggcctcaacagt

SEQ ID NO: 2317 - DNA, 25 bp, Artificial Sequence
  Description of Artificial Sequence: Synthetic probe
ggaaaacctcttgtgtgtggggact

SEQ ID NO: 2318 - DNA, 25 bp, Artificial Sequence
  Description of Artificial Sequence: Synthetic probe
gaccgcctcctcttagtcagtaggg

SEQ ID NO: 2319 - DNA, 25 bp, Artificial Sequence
  Description of Artificial Sequence: Synthetic probe
cttacctcctctcatcctttaaggg

SEQ ID NO: 2320 - DNA, 25 bp, Artificial Sequence
  Description of Artificial Sequence: Synthetic probe
gtgtggtgtcgtctcacattgattt

SEQ ID NO: 2321 - DNA, 25 bp, Artificial Sequence
  Description of Artificial Sequence: Synthetic probe
acgactcgtcacctctttgtgttga

SEQ ID NO: 2322 - DNA, 25 bp, Artificial Sequence
  Description of Artificial Sequence: Synthetic probe
cttcctcctctccatgttaagagac

SEQ ID NO: 2323 - DNA, 25 bp, Artificial Sequence
  Description of Artificial Sequence: Synthetic probe
aaaggacctctggttagtcgtcgga

SEQ ID NO: 2324 - DNA, 25 bp, Artificial Sequence
  Description of Artificial Sequence: Synthetic probe
gatcacctcctctcctccgtacccg

SEQ ID NO: 2325 - DNA, 25 bp, Artificial Sequence
  Description of Artificial Sequence: Synthetic probe
ataacgacacctctctatttctgct

SEQ ID NO: 2326 - DNA, 25 bp, Artificial Sequence
  Description of Artificial Sequence: Synthetic probe
acaccgtcctctctgaaggagggtc

SEQ ID NO: 2327 - DNA, 25 bp, Artificial Sequence
  Description of Artificial Sequence: Synthetic probe
tttcctcgtctcttcgaaacctagg

SEQ ID NO: 2328 - DNA, 25 bp, Artificial Sequence
  Description of Artificial Sequence: Synthetic probe
acataatatctctgtgtgtgcggaa

SEQ ID NO: 2329 - skipped

SEQ ID NO: 2330 - DNA, 25 bp, Artificial Sequence
  Description of Artificial Sequence: Synthetic probe
gtagtgtgcgtgtctctcgaacctt

SEQ ID NO: 2331 - DNA, 25 bp, Artificial Sequence
  Description of Artificial Sequence: Synthetic probe
atccgacacactcccagaggtcagg

SEQ ID NO: 2332 - DNA, 25 bp, Artificial Sequence
  Description of Artificial Sequence: Synthetic probe
agaatgtgtactccactttggggtt

SEQ ID NO: 2333 - skipped

SEQ ID NO: 2334 - DNA, 25 bp, Artificial Sequence
  Description of Artificial Sequence: Synthetic probe
gtgtgtgtgtagactcccggaacca

SEQ ID NO: 2335 - DNA, 25 bp, Artificial Sequence
  Description of Artificial Sequence: Synthetic probe
atcacacacactcacaaaagggtcc

SEQ ID NO: 2336 - DNA, 25 bp, Artificial Sequence
  Description of Artificial Sequence: Synthetic probe
ggaagtgtcactcacgatgtcaagt

SEQ ID NO: 2337 - DNA, 25 bp, Artificial Sequence
  Description of Artificial Sequence: Synthetic probe
tggtcccgactccttctggtgcaag

SEQ ID NO: 2338 - DNA, 25 bp, Artificial Sequence
  Description of Artificial Sequence: Synthetic probe
ggtgtacaccactcacggcccatgt

SEQ ID NO: 2339 - DNA, 25 bp, Artificial Sequence
  Description of Artificial Sequence: Synthetic probe
cttatgtacactcactcacgtcgtg

SEQ ID NO: 2340 - DNA, 25 bp, Artificial Sequence
  Description of Artificial Sequence: Synthetic probe
agaacccgactctctgcgatatcac

SEQ ID NO: 2341 - DNA, 25 bp, Artificial Sequence
  Description of Artificial Sequence: Synthetic probe
agacgtcccgactcttccacttggg

SEQ ID NO: 2342 - DNA, 25 bp, Artificial Sequence
  Description of Artificial Sequence: Synthetic probe
ttttcgtgactctttcggtttgtat

SEQ ID NO: 2343 - DNA, 25 bp, Artificial Sequence
  Description of Artificial Sequence: Synthetic probe
attttcactcttgtgtgttgtgtcg

SEQ ID NO: 2344 - DNA, 25 bp, Artificial Sequence
  Description of Artificial Sequence: Synthetic probe
gtccgcacgacactctcgagaaaag

SEQ ID NO: 2345 - DNA, 25 bp, Artificial Sequence
  Description of Artificial Sequence: Synthetic probe
actccttcctcgtataaggtttgag

SEQ ID NO: 2346 - DNA, 25 bp, Artificial Sequence
  Description of Artificial Sequence: Synthetic probe
ccggtctgctcgtgtgtgtcaacaa

SEQ ID NO: 2347 - DNA, 25 bp, Artificial Sequence
  Description of Artificial Sequence: Synthetic probe
cgtcatcgtcctcgcgagtcagatg

SEQ ID NO: 2348 - DNA, 25 bp, Artificial Sequence
  Description of Artificial Sequence: Synthetic probe
atgacgacgtcctcgacaacgacct

SEQ ID NO: 2349 - DNA, 25 bp, Artificial Sequence
  Description of Artificial Sequence: Synthetic probe
gtctggttcgtctcgagagtccctc

SEQ ID NO: 2350 - DNA, 25 bp, Artificial Sequence
  Description of Artificial Sequence: Synthetic probe
cgcctctgctcgtgcgagtgcgtgc

SEQ ID NO: 2351 - DNA, 25 bp, Artificial Sequence
  Description of Artificial Sequence: Synthetic probe
ctcgccgcctcgtaagtgtcacttt

SEQ ID NO: 2352 - DNA, 25 bp, Artificial Sequence
  Description of Artificial Sequence: Synthetic probe
ctagtgttcgtctcggttccaagta

SEQ ID NO: 2353 - DNA, 25 bp, Artificial Sequence
  Description of Artificial Sequence: Synthetic probe
actcgccgcctcgtaagtgtcactt

SEQ ID NO: 2354 - DNA, 25 bp, Artificial Sequence
  Description of Artificial Sequence: Synthetic probe
tccaccgtcctcgtagaagactctt

SEQ ID NO: 2355 - DNA, 25 bp, Artificial Sequence
  Description of Artificial Sequence: Synthetic probe
cacacgccctcgtgcatgtgtgtgt

SEQ ID NO: 2356 - DNA, 25 bp, Artificial Sequence
  Description of Artificial Sequence: Synthetic probe
gtcccatcctcgtgtactacgtagg

SEQ ID NO: 2357 - DNA, 25 bp, Artificial Sequence
  Description of Artificial Sequence: Synthetic probe
gtcgactcgtccctcgtccgagggt

SEQ ID NO: 2358 - DNA, 25 bp, Artificial Sequence
  Description of Artificial Sequence: Synthetic probe
ttacaccacactcgtataggggatg

SEQ ID NO: 2359 - DNA, 25 bp, Artificial Sequence
  Description of Artificial Sequence: Synthetic probe
gtgtgtgtgctctcgtacttcgtgt

SEQ ID NO: 2360 - DNA, 25 bp, Artificial Sequence
  Description of Artificial Sequence: Synthetic probe
ccacacacgtactcgcacctgggcc

SEQ ID NO: 2361 - DNA, 25 bp, Artificial Sequence
  Description of Artificial Sequence: Synthetic probe
ctttgtgtctcgtgtgactctcgaa

SEQ ID NO: 2362 - DNA, 25 bp, Artificial Sequence
  Description of Artificial Sequence: Synthetic probe
tgcggcgctgtgctcgtgtagccca

SEQ ID NO: 2363 - DNA, 25 bp, Artificial Sequence
  Description of Artificial Sequence: Synthetic probe
gaccatcaactcgtgtgtgtagtgt

SEQ ID NO: 2364 - DNA, 25 bp, Artificial Sequence
  Description of Artificial Sequence: Synthetic probe
ggacctgccgtcattcctcagtgag

SEQ ID NO: 2365 - DNA, 25 bp, Artificial Sequence
  Description of Artificial Sequence: Synthetic probe
gtggtggtggttccctaacgtttcc

SEQ ID NO: 2366 - DNA, 25 bp, Artificial Sequence
  Description of Artificial Sequence: Synthetic probe
ccttataactcgtgggtgtgtctcc

SEQ ID NO: 2367 - skipped

SEQ ID NO: 2368 - DNA, 25 bp, Artificial Sequence
  Description of Artificial Sequence: Synthetic probe
agagtgttggtttgaatggagtata

SEQ ID NO: 2369 - DNA, 25 bp, Artificial Sequence
  Description of Artificial Sequence: Synthetic probe
acgtttgtggttgtttgcccgaatc

SEQ ID NO: 2370 - DNA, 25 bp, Artificial Sequence
  Description of Artificial Sequence: Synthetic probe
acatggtggtttgtgcctccctgta

SEQ ID NO: 2371 - DNA, 25 bp, Artificial Sequence
  Description of Artificial Sequence: Synthetic probe
aagagtctggttggtctgaagaaaa

SEQ ID NO: 2372 - DNA, 25 bp, Artificial Sequence
  Description of Artificial Sequence: Synthetic probe
attgttggttggtgcttaccctccg

SEQ ID NO: 2373 - DNA, 25 bp, Artificial Sequence
  Description of Artificial Sequence: Synthetic probe
cagttatggtttaagtgtgtggaaa

SEQ ID NO: 2374 - DNA, 25 bp, Artificial Sequence
  Description of Artificial Sequence: Synthetic probe
tcgtgtatgtggtttcgtccgttac

SEQ ID NO: 2375 - DNA, 25 bp, Artificial Sequence
  Description of Artificial Sequence: Synthetic probe
acgtagtggtggttggcctacctcc

SEQ ID NO: 2376 - DNA, 25 bp, Artificial Sequence
  Description of Artificial Sequence: Synthetic probe
aaccgttggttgtgcgggcgtcaca

SEQ ID NO: 2377 - DNA, 25 bp, Artificial Sequence
  Description of Artificial Sequence: Synthetic probe
gttagggtcggtttgttcgttaaaa

SEQ ID NO: 2378 - DNA, 25 bp, Artificial Sequence
  Description of Artificial Sequence: Synthetic probe
acggttgtggttgtacttagtcctc

SEQ ID NO: 2379 - DNA, 25 bp, Artificial Sequence
  Description of Artificial Sequence: Synthetic probe
agggttgtgttcgtgccgtccttca

SEQ ID NO: 2380 - DNA, 25 bp, Artificial Sequence
  Description of Artificial Sequence: Synthetic probe
agtgtgtgggttcgtccattcgtgc

SEQ ID NO: 2381 - DNA, 25 bp, Artificial Sequence
  Description of Artificial Sequence: Synthetic probe
ccggtgtggttctcgaagcctttgc

SEQ ID NO: 2382 - DNA, 25 bp, Artificial Sequence
  Description of Artificial Sequence: Synthetic probe
agaccgctggttcgtgtttgactga

SEQ ID NO: 2383 - DNA, 25 bp, Artificial Sequence
  Description of Artificial Sequence: Synthetic probe
accactcgtggttcgtgttccgtag

SEQ ID NO: 2384 - DNA, 25 bp, Artificial Sequence
  Description of Artificial Sequence: Synthetic probe
aagtgtagtggttcgtgtttcgacc

SEQ ID NO: 2385 - DNA, 25 bp, Artificial Sequence
  Description of Artificial Sequence: Synthetic probe
ttgtgtcgggttatggattactatg

SEQ ID NO: 2386 - DNA, 25 bp, Artificial Sequence
  Description of Artificial Sequence: Synthetic probe
atacatgtcggttcggttgagtcag

SEQ ID NO: 2387 - DNA, 25 bp, Artificial Sequence
  Description of Artificial Sequence: Synthetic probe
atatcttatgttgtggttgcagcgt

SEQ ID NO: 2388 - DNA, 25 bp, Artificial Sequence
  Description of Artificial Sequence: Synthetic probe
ggtctttgtgttcgatttataaaat

SEQ ID NO: 2389 - DNA, 25 bp, Artificial Sequence
  Description of Artificial Sequence: Synthetic probe
acactcagttgtttgttgttggaga

SEQ ID NO: 2390 - DNA, 25 bp, Artificial Sequence
  Description of Artificial Sequence: Synthetic probe
ctacgaggttgttggtgtaagtgtc

SEQ ID NO: 2391 - DNA, 25 bp, Artificial Sequence
  Description of Artificial Sequence: Synthetic probe
tctcagtcgttgttgttaagccatc

SEQ ID NO: 2392 - DNA, 25 bp, Artificial Sequence
  Description of Artificial Sequence: Synthetic probe
catcgagttgtttttgtgtgcttgc

SEQ ID NO: 2393 - DNA, 25 bp, Artificial Sequence
  Description of Artificial Sequence: Synthetic probe
tttcagttgtttcggtggtcgtttt

SEQ ID NO: 2394 - DNA, 25 bp, Artificial Sequence
  Description of Artificial Sequence: Synthetic probe
cgttgtttgttgagtgcttagtccg

SEQ ID NO: 2395 - DNA, 25 bp, Artificial Sequence
  Description of Artificial Sequence: Synthetic probe
agtaggtacgttgtttgtcgataac

SEQ ID NO: 2396 - DNA, 25 bp, Artificial Sequence
  Description of Artificial Sequence: Synthetic probe
cacatcgttgttgtcgggtttggga

SEQ ID NO: 2397 - DNA, 25 bp, Artificial Sequence
  Description of Artificial Sequence: Synthetic probe
gtgaccggtgtgttgactcagcctt

SEQ ID NO: 2398 - DNA, 25 bp, Artificial Sequence
  Description of Artificial Sequence: Synthetic probe
agttccatgttggtgtgtttctccc

SEQ ID NO: 2399 - DNA, 25 bp, Artificial Sequence
  Description of Artificial Sequence: Synthetic probe
aggtctgctgttgtctggatcgatt

SEQ ID NO: 2400 - DNA, 25 bp, Artificial Sequence
  Description of Artificial Sequence: Synthetic probe
cggatgttgttgtcgtagttcgcac

SEQ ID NO: 2401 - DNA, 25 bp, Artificial Sequence
  Description of Artificial Sequence: Synthetic probe
cagggtctgttgttagggttctttc

SEQ ID NO: 2402 - DNA, 25 bp, Artificial Sequence
  Description of Artificial Sequence: Synthetic probe
ttcggtgtactgtttggatatttct

SEQ ID NO: 2403 - DNA, 25 bp, Artificial Sequence
  Description of Artificial Sequence: Synthetic probe
catgtatctgttgtggtgattaaac

SEQ ID NO: 2404 - DNA, 25 bp, Artificial Sequence
  Description of Artificial Sequence: Synthetic probe
cctaccgctgtttgtgtgtgacttg

SEQ ID NO: 2405 - DNA, 25 bp, Artificial Sequence
  Description of Artificial Sequence: Synthetic probe
ttcatcgtctgttgtgtgaggtcct

SEQ ID NO: 2406 - DNA, 25 bp, Artificial Sequence
  Description of Artificial Sequence: Synthetic probe
aatttctgttgtggtggtccaactt

SEQ ID NO: 2407 - DNA, 25 bp, Artificial Sequence
  Description of Artificial Sequence: Synthetic probe
ctgactgtgtgtttccctgaaccgg

SEQ ID NO: 2408 - DNA, 25 bp, Artificial Sequence
  Description of Artificial Sequence: Synthetic probe
tcaggttgtgtttgttcttgaagtc

SEQ ID NO: 2409-2410 - skipped (2 entries)

SEQ ID NO: 2411 - DNA, 25 bp, Artificial Sequence
  Description of Artificial Sequence: Synthetic probe
acgtcggtcgatgttcctttctcca

SEQ ID NO: 2412 - DNA, 25 bp, Artificial Sequence
  Description of Artificial Sequence: Synthetic probe
ttcgactggtgttgtcggtgatgct

SEQ ID NO: 2413 - DNA, 25 bp, Artificial Sequence
  Description of Artificial Sequence: Synthetic probe
aggtgtcggtgttagtttcggttcc

SEQ ID NO: 2414 - DNA, 25 bp, Artificial Sequence
  Description of Artificial Sequence: Synthetic probe
ttgtggtgtgttggatgtacgacct

SEQ ID NO: 2415 - DNA, 25 bp, Artificial Sequence
  Description of Artificial Sequence: Synthetic probe
agctctggtgttgggtcttaggacc

SEQ ID NO: 2416 - DNA, 25 bp, Artificial Sequence
  Description of Artificial Sequence: Synthetic probe
gtctgactgtgtgtttccctgaacc

SEQ ID NO: 2417 - DNA, 25 bp, Artificial Sequence
  Description of Artificial Sequence: Synthetic probe
ttataaggtgtttacggtgtttctt

SEQ ID NO: 2418 - DNA, 25 bp, Artificial Sequence
  Description of Artificial Sequence: Synthetic probe
agagtgagtgtgttcttactctttt

SEQ ID NO: 2419 - DNA, 25 bp, Artificial Sequence
  Description of Artificial Sequence: Synthetic probe
aggggtctgttcgtggtgtacaccc

SEQ ID NO: 2420 - DNA, 25 bp, Artificial Sequence
  Description of Artificial Sequence: Synthetic probe
ctttgtgtgtttcgagcccgtctct

SEQ ID NO: 2421 - DNA, 25 bp, Artificial Sequence
  Description of Artificial Sequence: Synthetic probe
agcagtgtgtgtttgtgccacgccc

SEQ ID NO: 2422 - DNA, 25 bp, Artificial Sequence
  Description of Artificial Sequence: Synthetic probe
tcctcgcgtgtgttggtctgccacc

SEQ ID NO: 2423 - DNA, 25 bp, Artificial Sequence
  Description of Artificial Sequence: Synthetic probe
gttgtgtcagtgtttacggaagtaa

SEQ ID NO: 2424 - DNA, 25 bp, Artificial Sequence
  Description of Artificial Sequence: Synthetic probe
gacctgtcgtgtgttggataggact

SEQ ID NO: 2425 - DNA, 25 bp, Artificial Sequence
  Description of Artificial Sequence: Synthetic probe
cttttgtgttgtgtctgtctgcgtt

SEQ ID NO: 2426 - DNA, 25 bp, Artificial Sequence
  Description of Artificial Sequence: Synthetic probe
cactgagtgtgttgggtcgtgaacc

SEQ ID NO: 2427 - DNA, 25 bp, Artificial Sequence
  Description of Artificial Sequence: Synthetic probe
ctgtaatgtgttggtgtcgtgaacg

SEQ ID NO: 2428 - DNA, 25 bp, Artificial Sequence
  Description of Artificial Sequence: Synthetic probe
tccattgtgttcgtgctgcgctagt

SEQ ID NO: 2429 - DNA, 25 bp, Artificial Sequence
  Description of Artificial Sequence: Synthetic probe
tcttcctgtgttcttgtgcctcgtg

SEQ ID NO: 2430 - DNA, 25 bp, Artificial Sequence
  Description of Artificial Sequence: Synthetic probe
ccgtgagtgtgttggtgtacaatct

SEQ ID NO: 2431 - DNA, 25 bp, Artificial Sequence
  Description of Artificial Sequence: Synthetic probe
aaattgtgttccgtgtgtgctccca

SEQ ID NO: 2432 - DNA, 25 bp, Artificial Sequence
  Description of Artificial Sequence: Synthetic probe
gagcggtctgtgttagggtcctcta

SEQ ID NO: 2433 - DNA, 25 bp, Artificial Sequence
  Description of Artificial Sequence: Synthetic probe
ttgagtaagtgtgttgggttgaata

SEQ ID NO: 2434 - DNA, 25 bp, Artificial Sequence
  Description of Artificial Sequence: Synthetic probe
cggcacactgttaggtcatgttccc

SEQ ID NO: 2435 - DNA, 25 bp, Artificial Sequence
  Description of Artificial Sequence: Synthetic probe
ctttcaagtttgtgtttgcgtgacg

SEQ ID NO: 2436 - DNA, 25 bp, Artificial Sequence
  Description of Artificial Sequence: Synthetic probe
aatgtctcagttggtcgggtaaccc

SEQ ID NO: 2437 - DNA, 25 bp, Artificial Sequence
  Description of Artificial Sequence: Synthetic probe
ctgtgtggagtttgttcacactttc

SEQ ID NO: 2438 - DNA, 25 bp, Artificial Sequence
  Description of Artificial Sequence: Synthetic probe
gctgaaccgagttgtttgacgtaat

SEQ ID NO: 2439 - DNA, 25 bp, Artificial Sequence
  Description of Artificial Sequence: Synthetic probe
gtcgacaacgttagttccggtaccg

SEQ ID NO: 2440 - DNA, 25 bp, Artificial Sequence
  Description of Artificial Sequence: Synthetic probe
caatttagttggtggtgatggtgac

SEQ ID NO: 2441 - DNA, 25 bp, Artificial Sequence
  Description of Artificial Sequence: Synthetic probe
ctagtagaggagttacgatcaccca

SEQ ID NO: 2442 - DNA, 25 bp, Artificial Sequence
  Description of Artificial Sequence: Synthetic probe
cctactccgtagttgtgtggggtag

SEQ ID NO: 2443 - DNA, 25 bp, Artificial Sequence
  Description of Artificial Sequence: Synthetic probe
aggtgtttagttcgtgtgttcgtcc

SEQ ID NO: 2444 - DNA, 25 bp, Artificial Sequence
  Description of Artificial Sequence: Synthetic probe
ttcgaccgggtggttactgggccca

SEQ ID NO: 2445 - DNA, 25 bp, Artificial Sequence
  Description of Artificial Sequence: Synthetic probe
gtgttcggtggtggctttcaagact

SEQ ID NO: 2446 - skipped

SEQ ID NO: 2447 - DNA, 25 bp, Artificial Sequence
  Description of Artificial Sequence: Synthetic probe
agtcttgggtggtggttacattcta

SEQ ID NO: 2448 - DNA, 25 bp, Artificial Sequence
  Description of Artificial Sequence: Synthetic probe
accggttggtgggtctacttcgttt

SEQ ID NO: 2449 - skipped

SEQ ID NO: 2450 - DNA, 25 bp, Artificial Sequence
  Description of Artificial Sequence: Synthetic probe
gttattcgtgtgtggtcaaaaaagg

SEQ ID NO: 2451 - DNA, 25 bp, Artificial Sequence
  Description of Artificial Sequence: Synthetic probe
agctcctggtggtgtgcttaccctt

SEQ ID NO: 2452 - DNA, 25 bp, Artificial Sequence
  Description of Artificial Sequence: Synthetic probe
cggccgtggtggtcttcagtccttt

SEQ ID NO: 2453 - DNA, 25 bp, Artificial Sequence
  Description of Artificial Sequence: Synthetic probe
agggttggtggactttgacttctta

SEQ ID NO: 2454 - DNA, 25 bp, Artificial Sequence
  Description of Artificial Sequence: Synthetic probe
atttgtggtggcgtgatactaatcg

SEQ ID NO: 2455 - DNA, 25 bp, Artificial Sequence
  Description of Artificial Sequence: Synthetic probe
gtaaatgggtgtggtgccttccacc

SEQ ID NO: 2456 - DNA, 25 bp, Artificial Sequence
  Description of Artificial Sequence: Synthetic probe
accattggtggtgtgctcacgtcgt

SEQ ID NO: 2457 - DNA, 25 bp, Artificial Sequence
  Description of Artificial Sequence: Synthetic probe
atggtagtggtggactttataggaa

SEQ ID NO: 2458 - DNA, 25 bp, Artificial Sequence
  Description of Artificial Sequence: Synthetic probe
gtacttggtggtggcttttgaagaa

SEQ ID NO: 2459 - DNA, 25 bp, Artificial Sequence
  Description of Artificial Sequence: Synthetic probe
atcttcgaggtggtgtttgtacagc

SEQ ID NO: 2460 - DNA, 25 bp, Artificial Sequence
  Description of Artificial Sequence: Synthetic probe
ctagtggtggtggaatttcccgttc

SEQ ID NO: 2461 - DNA, 25 bp, Artificial Sequence
  Description of Artificial Sequence: Synthetic probe
atatatagtggtggtgcgtagtatc

SEQ ID NO: 2462 - DNA, 25 bp, Artificial Sequence
  Description of Artificial Sequence: Synthetic probe
atccggtggtggtatcagtcccttc

SEQ ID NO: 2463 - DNA, 25 bp, Artificial Sequence
  Description of Artificial Sequence: Synthetic probe
acttcagtggtggtgactctggaca

SEQ ID NO: 2464 - DNA, 25 bp, Artificial Sequence
  Description of Artificial Sequence: Synthetic probe
cttttacggtggtagtggtatgaag

SEQ ID NO: 2465 - DNA, 25 bp, Artificial Sequence
  Description of Artificial Sequence: Synthetic probe
tgttggtggtgccagtgagtctcgt

SEQ ID NO: 2466 - DNA, 25 bp, Artificial Sequence
  Description of Artificial Sequence: Synthetic probe
agttggtggtggtaatcctacactc

SEQ ID NO: 2467 - DNA, 25 bp, Artificial Sequence
  Description of Artificial Sequence: Synthetic probe
actattacgtggtggtagtctggtc

SEQ ID NO: 2468 - DNA, 25 bp, Artificial Sequence
  Description of Artificial Sequence: Synthetic probe
acattgtggtggtgaggacgtcaac

SEQ ID NO: 2469 - DNA, 25 bp, Artificial Sequence
  Description of Artificial Sequence: Synthetic probe
cacggtgtggtggtcgacaagacaa

SEQ ID NO: 2470 - DNA, 25 bp, Artificial Sequence
  Description of Artificial Sequence: Synthetic probe
acctgtgcggtggtcggacagactt

SEQ ID NO: 2471 - DNA, 25 bp, Artificial Sequence
  Description of Artificial Sequence: Synthetic probe
acgtataggtggtggtatctcgagt

SEQ ID NO: 2472 - DNA, 25 bp, Artificial Sequence
  Description of Artificial Sequence: Synthetic probe
taccgagagtcggtggtgttttacc

SEQ ID NO: 2473 - DNA, 25 bp, Artificial Sequence
  Description of Artificial Sequence: Synthetic probe
cactcttcggtggtgccgtctgtta

SEQ ID NO: 2474 - DNA, 25 bp, Artificial Sequence
  Description of Artificial Sequence: Synthetic probe
tttatagacggtgcggtgcgcaagt

SEQ ID NO: 2475 - DNA, 25 bp, Artificial Sequence
  Description of Artificial Sequence: Synthetic probe
atcgtggtggtgcccgtctcggtcc

SEQ ID NO: 2476 - DNA, 25 bp, Artificial Sequence
  Description of Artificial Sequence: Synthetic probe
ctatctgtcggtggttcgtgacttc

SEQ ID NO: 2477 - DNA, 25 bp, Artificial Sequence
  Description of Artificial Sequence: Synthetic probe
ggtgtgttggtgcactagtagttaa

SEQ ID NO: 2478 - DNA, 25 bp, Artificial Sequence
  Description of Artificial Sequence: Synthetic probe
agtagggtcggtgcgtgatactctt

SEQ ID NO: 2479 - DNA, 25 bp, Artificial Sequence
  Description of Artificial Sequence: Synthetic probe
gaaacgcgtctgtggaatgattaga

SEQ ID NO: 2480 - DNA, 25 bp, Artificial Sequence
  Description of Artificial Sequence: Synthetic probe
cagtgtgtggtgatccaggcgtccc

SEQ ID NO: 2481 - DNA, 25 bp, Artificial Sequence
  Description of Artificial Sequence: Synthetic probe
atgtggtggtgaggacacatctctt

SEQ ID NO: 2482 - DNA, 25 bp, Artificial Sequence
  Description of Artificial Sequence: Synthetic probe
gagaggagtgtgtggtctgtcgagt

SEQ ID NO: 2483 - DNA, 25 bp, Artificial Sequence
  Description of Artificial Sequence: Synthetic probe
atccactggtgacatcttcggacct

SEQ ID NO: 2484 - DNA, 25 bp, Artificial Sequence
  Description of Artificial Sequence: Synthetic probe
acatcgtcctgtggttttggcataa

SEQ ID NO: 2485 - DNA, 25 bp, Artificial Sequence
  Description of Artificial Sequence: Synthetic probe
ctgtggtccgtgcaggtaccattat

SEQ ID NO: 2486 - DNA, 25 bp, Artificial Sequence
  Description of Artificial Sequence: Synthetic probe
ttccgttatgtgtggttggttactt

SEQ ID NO: 2487 - DNA, 25 bp, Artificial Sequence
  Description of Artificial Sequence: Synthetic probe
tcaatatctgtggtcgtgtgaacct

SEQ ID NO: 2488 - DNA, 25 bp, Artificial Sequence
  Description of Artificial Sequence: Synthetic probe
cgtgtaggtctgtggttaatgagtt

SEQ ID NO: 2489 - DNA, 25 bp, Artificial Sequence
  Description of Artificial Sequence: Synthetic probe
actttgtctgtgtgccgcagacggg

SEQ ID NO: 2490 - DNA, 25 bp, Artificial Sequence
  Description of Artificial Sequence: Synthetic probe
agtagcttgtgtggggttgcctcca

SEQ ID NO: 2491 - DNA, 25 bp, Artificial Sequence
  Description of Artificial Sequence: Synthetic probe
ttatggatgtggtgtttcgtgactc

SEQ ID NO: 2492 - DNA, 25 bp, Artificial Sequence
  Description of Artificial Sequence: Synthetic probe
aacgtgtgatgtggtgtgtctgcca

SEQ ID NO: 2493 - DNA, 25 bp, Artificial Sequence
  Description of Artificial Sequence: Synthetic probe
gaggtggttgtggttaacacgtcac

SEQ ID NO: 2494 - DNA, 25 bp, Artificial Sequence
  Description of Artificial Sequence: Synthetic probe
ataatattgtggtggtgtcttcaga

SEQ ID NO: 2495 - DNA, 25 bp, Artificial Sequence
  Description of Artificial Sequence: Synthetic probe
gtcggttcgttgtggttcccaaccg

SEQ ID NO: 2496 - DNA, 25 bp, Artificial Sequence
  Description of Artificial Sequence: Synthetic probe
tcacaggtgtgtggaataaggagaa

SEQ ID NO: 2497 - DNA, 25 bp, Artificial Sequence
  Description of Artificial Sequence: Synthetic probe
gaggttttgtggtcttaggtgttcc

SEQ ID NO: 2498 - DNA, 25 bp, Artificial Sequence
  Description of Artificial Sequence: Synthetic probe
caacacttgtggtgaagtgagtgtg

SEQ ID NO: 2499 - DNA, 25 bp, Artificial Sequence
  Description of Artificial Sequence: Synthetic probe
ggtcctgttgtggtggtcctttcac

SEQ ID NO: 2500 - DNA, 25 bp, Artificial Sequence
  Description of Artificial Sequence: Synthetic probe
gtgaggtctgtgtgcatgccgaacc

SEQ ID NO: 2501 - DNA, 25 bp, Artificial Sequence
  Description of Artificial Sequence: Synthetic probe
gctcatactgtgtggtgtcgtcaat

SEQ ID NO: 2502 - DNA, 25 bp, Artificial Sequence
  Description of Artificial Sequence: Synthetic probe
atacgcatgtgtgggtctatgtgtg

SEQ ID NO: 2503 - DNA, 25 bp, Artificial Sequence
  Description of Artificial Sequence: Synthetic probe
ctatatcctgtggtgtgttttaccc

SEQ ID NO: 2504 - DNA, 25 bp, Artificial Sequence
  Description of Artificial Sequence: Synthetic probe
tcttgtatcgtgtgggtgacatctc

SEQ ID NO: 2505 - DNA, 25 bp, Artificial Sequence
  Description of Artificial Sequence: Synthetic probe
gtcctgcgcgtgtgcttgtcggaca

SEQ ID NO: 2506 - DNA, 25 bp, Artificial Sequence
  Description of Artificial Sequence: Synthetic probe
ttacctggtgtggtgtcacctctga

SEQ ID NO: 2507 - DNA, 25 bp, Artificial Sequence
  Description of Artificial Sequence: Synthetic probe
cctcgggtgtggtgtacacaggtcc

SEQ ID NO: 2508 - DNA, 25 bp, Artificial Sequence
  Description of Artificial Sequence: Synthetic probe
gttacctggtgtggtgtcacctctg

SEQ ID NO: 2509 - DNA, 25 bp, Artificial Sequence
  Description of Artificial Sequence: Synthetic probe
tagggtgcgtgtggcttcccgacca

SEQ ID NO: 2510 - skipped

SEQ ID NO: 2511 - DNA, 25 bp, Artificial Sequence
  Description of Artificial Sequence: Synthetic probe
atcatgtgtgtgcttactggtgaca

SEQ ID NO: 2512 - DNA, 25 bp, Artificial Sequence
  Description of Artificial Sequence: Synthetic probe
ccacaggtgtgggtgtttgtcccta

SEQ ID NO: 2513 - DNA, 25 bp, Artificial Sequence
  Description of Artificial Sequence: Synthetic probe
ttcgtgtcgtagtgtgcagggtcct

SEQ ID NO: 2514 - DNA, 25 bp, Artificial Sequence
  Description of Artificial Sequence: Synthetic probe
aatgttgtgtgggttgtccttcgac

SEQ ID NO: 2515 - DNA, 25 bp, Artificial Sequence
  Description of Artificial Sequence: Synthetic probe
ccacaagtgtggtgttgtctgtgca

SEQ ID NO: 2516 - DNA, 25 bp, Artificial Sequence
  Description of Artificial Sequence: Synthetic probe
gtatagaatgtgtggtgtcatccgt

SEQ ID NO: 2517 - DNA, 25 bp, Artificial Sequence
  Description of Artificial Sequence: Synthetic probe
atttgtgtgtgccaaccggtcacta

SEQ ID NO: 2518 - DNA, 25 bp, Artificial Sequence
  Description of Artificial Sequence: Synthetic probe
gcaccgagtgtgtggtcttccataa

SEQ ID NO: 2519 - DNA, 25 bp, Artificial Sequence
  Description of Artificial Sequence: Synthetic probe
ccactctacgtgtggtgtaagcaca

SEQ ID NO: 2520 - DNA, 25 bp, Artificial Sequence
  Description of Artificial Sequence: Synthetic probe
cttgatgtgtgagtggtgtctgtac

SEQ ID NO: 2521 - DNA, 25 bp, Artificial Sequence
  Description of Artificial Sequence: Synthetic probe
gtactctcagtgtgtgctccaaggt

SEQ ID NO: 2522 - DNA, 25 bp, Artificial Sequence
  Description of Artificial Sequence: Synthetic probe
actacatgtgtgtgcgatctgggac

SEQ ID NO: 2523 - DNA, 25 bp, Artificial Sequence
  Description of Artificial Sequence: Synthetic probe
caggtggtgtgacgtgaccgtcacc

SEQ ID NO: 2524 - skipped

SEQ ID NO: 2525 - DNA, 25 bp, Artificial Sequence
  Description of Artificial Sequence: Synthetic probe
acagtggtggtgttcaggtaaagaa

SEQ ID NO: 2526 - skipped

SEQ ID NO: 2527 - DNA, 25 bp, Artificial Sequence
  Description of Artificial Sequence: Synthetic probe
cggggaggtgtggatgtcgaaaggt

SEQ ID NO: 2528 - DNA, 25 bp, Artificial Sequence
  Description of Artificial Sequence: Synthetic probe
cacctgtggtgtgggtagtgggtaa

SEQ ID NO: 2529 - DNA, 25 bp, Artificial Sequence
  Description of Artificial Sequence: Synthetic probe
cgaagtgtgtgtgacctggtaagca

SEQ ID NO: 2530 - DNA, 25 bp, Artificial Sequence
  Description of Artificial Sequence: Synthetic probe
cacgtgttgtgtgagacgatgtgtc

SEQ ID NO: 2531 - DNA, 25 bp, Artificial Sequence
  Description of Artificial Sequence: Synthetic probe
acctagttcgtgtgagcgagtcatc

SEQ ID NO: 2532 - skipped

SEQ ID NO: 2533 - DNA, 25 bp, Artificial Sequence
  Description of Artificial Sequence: Synthetic probe
acgtattgtgtgtgataggtgcatt

SEQ ID NO: 2534 - DNA, 25 bp, Artificial Sequence
  Description of Artificial Sequence: Synthetic probe
tcctggtggtgtgacctcatcgtga

SEQ ID NO: 2535 - DNA, 25 bp, Artificial Sequence
  Description of Artificial Sequence: Synthetic probe
aggtcctggtgtggcaaccgtccac

SEQ ID NO: 2536 - DNA, 25 bp, Artificial Sequence
  Description of Artificial Sequence: Synthetic probe
aattccggtgtgtgctataagtgcc

SEQ ID NO: 2537 - DNA, 25 bp, Artificial Sequence
  Description of Artificial Sequence: Synthetic probe
ccaaaggtgtgtgggatcttgtgac

SEQ ID NO: 2538 - DNA, 25 bp, Artificial Sequence
  Description of Artificial Sequence: Synthetic probe
acacgggtgtgtgagaccaggttct

SEQ ID NO: 2539 - DNA, 25 bp, Artificial Sequence
  Description of Artificial Sequence: Synthetic probe
acgttccgggtgtggctcgtgcatc

SEQ ID NO: 2540 - DNA, 25 bp, Artificial Sequence
  Description of Artificial Sequence: Synthetic probe
ctactcgagtgtgtgaaagacctag

SEQ ID NO: 2541 - DNA, 25 bp, Artificial Sequence
  Description of Artificial Sequence: Synthetic probe
ccctgtgtgtgatcacgcgaccgaa

SEQ ID NO: 2542 - skipped

SEQ ID NO: 2543 - DNA, 25 bp, Artificial Sequence
  Description of Artificial Sequence: Synthetic probe
cggtgttggtgtggatccctacgaa

SEQ ID NO: 2544 - DNA, 25 bp, Artificial Sequence
  Description of Artificial Sequence: Synthetic probe
tatcgtttggtgtgagccgtgtcct

SEQ ID NO: 2545 - DNA, 25 bp, Artificial Sequence
  Description of Artificial Sequence: Synthetic probe
tcgtttggtgtgagccgtgtccttc

SEQ ID NO: 2546 - DNA, 25 bp, Artificial Sequence
  Description of Artificial Sequence: Synthetic probe
tattttggtgttcgtttggtcggac

SEQ ID NO: 2547 - DNA, 25 bp, Artificial Sequence
  Description of Artificial Sequence: Synthetic probe
tctcaaggtgtgtgcatagtaggta

SEQ ID NO: 2548 - DNA, 25 bp, Artificial Sequence
  Description of Artificial Sequence: Synthetic probe
agtgcgttggtgtgagattggaccc

SEQ ID NO: 2549 - DNA, 25 bp, Artificial Sequence
  Description of Artificial Sequence: Synthetic probe
cctacggtggtgttgtgtttctcct

SEQ ID NO: 2550 - DNA, 25 bp, Artificial Sequence
  Description of Artificial Sequence: Synthetic probe
tctcaaaggtgtggtgtctgtctcc

SEQ ID NO: 2551 - DNA, 25 bp, Artificial Sequence
  Description of Artificial Sequence: Synthetic probe
gaggcataggtgtgtgtgcacttcc

SEQ ID NO: 2552 - DNA, 25 bp, Artificial Sequence
  Description of Artificial Sequence: Synthetic probe
agcagagtggtgtgatctctgacgc

SEQ ID NO: 2553 - DNA, 25 bp, Artificial Sequence
  Description of Artificial Sequence: Synthetic probe
acagttgtggtgttggtcgtcatac

SEQ ID NO: 2554 - DNA, 25 bp, Artificial Sequence
  Description of Artificial Sequence: Synthetic probe
tgtaagtgtggtgtgctacgtcgga

SEQ ID NO: 2555 - DNA, 25 bp, Artificial Sequence
  Description of Artificial Sequence: Synthetic probe
aagactccggtgtgtagagctccgt

SEQ ID NO: 2556 - DNA, 25 bp, Artificial Sequence
  Description of Artificial Sequence: Synthetic probe
agaaaaggtgtgtgtgtcgtccgac

SEQ ID NO: 2557 - DNA, 25 bp, Artificial Sequence
  Description of Artificial Sequence: Synthetic probe
tggcgtcgggtgtcaaagatacact

SEQ ID NO: 2558 - DNA, 25 bp, Artificial Sequence
  Description of Artificial Sequence: Synthetic probe
gtggtcgtgggtgtccaaccgactc

SEQ ID NO: 2559 - DNA, 25 bp, Artificial Sequence
  Description of Artificial Sequence: Synthetic probe
gttttgtggtgtgtgccgtcaactc

SEQ ID NO: 2560 - DNA, 25 bp, Artificial Sequence
  Description of Artificial Sequence: Synthetic probe
acctttggtgtgtttcgtgagccac

SEQ ID NO: 2561 - DNA, 25 bp, Artificial Sequence
  Description of Artificial Sequence: Synthetic probe
cgtcaggttgtgtttgttcttgaag

SEQ ID NO: 2562 - DNA, 25 bp, Artificial Sequence
  Description of Artificial Sequence: Synthetic probe
aatcctaggtgtggttgtgtctccg

SEQ ID NO: 2563 - DNA, 25 bp, Artificial Sequence
  Description of Artificial Sequence: Synthetic probe
cgagctatggtgtgtggttccagac

SEQ ID NO: 2564 - DNA, 25 bp, Artificial Sequence
  Description of Artificial Sequence: Synthetic probe
actgggtcggtgtgagtacctctac

SEQ ID NO: 2565 - DNA, 25 bp, Artificial Sequence
  Description of Artificial Sequence: Synthetic probe
tacggtgttggtgtggatccctacg

SEQ ID NO: 2566 - DNA, 25 bp, Artificial Sequence
  Description of Artificial Sequence: Synthetic probe
acaatacgtggtgtgttgtgtcacg

SEQ ID NO: 2567 - DNA, 25 bp, Artificial Sequence
  Description of Artificial Sequence: Synthetic probe
atggttcggtgtgtgttcaccatcc

SEQ ID NO: 2568 - DNA, 25 bp, Artificial Sequence
  Description of Artificial Sequence: Synthetic probe
tcgtgtgtctcggtgttgtcctcaa

SEQ ID NO: 2569 - DNA, 25 bp, Artificial Sequence
  Description of Artificial Sequence: Synthetic probe
taccttgtcggtgtcctcggtgcaa

SEQ ID NO: 2570 - skipped

SEQ ID NO: 2571 - DNA, 25 bp, Artificial Sequence
  Description of Artificial Sequence: Synthetic probe
gtgtgggtcggtgtctaatctaaaa

SEQ ID NO: 2572 - DNA, 25 bp, Artificial Sequence
  Description of Artificial Sequence: Synthetic probe
aagtatccgtgtgtgcaggacgcca

SEQ ID NO: 2573 - DNA, 25 bp, Artificial Sequence
  Description of Artificial Sequence: Synthetic probe
acggtaattgtgtgtctgaggtcat

SEQ ID NO: 2574 - DNA, 25 bp, Artificial Sequence
  Description of Artificial Sequence: Synthetic probe
gtccttgttgtgtgaagtcaacccg

SEQ ID NO: 2575 - DNA, 25 bp, Artificial Sequence
  Description of Artificial Sequence: Synthetic probe
gtgttgttggtgtatacttcatata

SEQ ID NO: 2576 - DNA, 25 bp, Artificial Sequence
  Description of Artificial Sequence: Synthetic probe
cttatggtgtgtgacactgtgtccg

SEQ ID NO: 2577 - DNA, 25 bp, Artificial Sequence
  Description of Artificial Sequence: Synthetic probe
aaggtatgtgtgtttgtaaggtatg

SEQ ID NO: 2578 - DNA, 25 bp, Artificial Sequence
  Description of Artificial Sequence: Synthetic probe
attcatcgtgtgtcctgggttagac

SEQ ID NO: 2579 - DNA, 25 bp, Artificial Sequence
  Description of Artificial Sequence: Synthetic probe
tatttcttgtgtgtgaggggtaacg

SEQ ID NO: 2580 - DNA, 25 bp, Artificial Sequence
  Description of Artificial Sequence: Synthetic probe
ttcaccgtcggtgtcgcactccgta

SEQ ID NO: 2581 - DNA, 25 bp, Artificial Sequence
  Description of Artificial Sequence: Synthetic probe
atcatcgttgtgttcgtgcgtttgg

SEQ ID NO: 2582 - DNA, 25 bp, Artificial Sequence
  Description of Artificial Sequence: Synthetic probe
gaaatctcgtgtgttgtttgtaaag

SEQ ID NO: 2583 - DNA, 25 bp, Artificial Sequence
  Description of Artificial Sequence: Synthetic probe
gctgaacgttgtgtggttctgttta

SEQ ID NO: 2584 - DNA, 25 bp, Artificial Sequence
  Description of Artificial Sequence: Synthetic probe
atcaggttgtgtgatcactcctctc

SEQ ID NO: 2585 - DNA, 25 bp, Artificial Sequence
  Description of Artificial Sequence: Synthetic probe
aagtgtttgtgttgctgagtgtaag

SEQ ID NO: 2586 - DNA, 25 bp, Artificial Sequence
  Description of Artificial Sequence: Synthetic probe
gtaaggtatgtgtgtttgtaaggta

SEQ ID NO: 2587 - DNA, 25 bp, Artificial Sequence
  Description of Artificial Sequence: Synthetic probe
tttatacctgtgtgtgatttgtgtg

SEQ ID NO: 2588 - DNA, 25 bp, Artificial Sequence
  Description of Artificial Sequence: Synthetic probe
aggagtcggtgtgtctctgaaccta

SEQ ID NO: 2589 - DNA, 25 bp, Artificial Sequence
  Description of Artificial Sequence: Synthetic probe
acagctgagtgtgttcgtgcctcct

SEQ ID NO: 2590 - DNA, 25 bp, Artificial Sequence
  Description of Artificial Sequence: Synthetic probe
gtgactaaagtgtgtggggcctctc

SEQ ID NO: 2591 - DNA, 25 bp, Artificial Sequence
  Description of Artificial Sequence: Synthetic probe
accgtcggtggtgtaccgtacttct

SEQ ID NO: 2592 - DNA, 25 bp, Artificial Sequence
  Description of Artificial Sequence: Synthetic probe
ctgaacgttgtgtggttctgtttac

SEQ ID NO: 2593 - DNA, 25 bp, Artificial Sequence
  Description of Artificial Sequence: Synthetic probe
ggccggttgtgtgtaggtacactac

SEQ ID NO: 2594 - DNA, 25 bp, Artificial Sequence
  Description of Artificial Sequence: Synthetic probe
atatgggtgtgtctggtaatactcc

SEQ ID NO: 2595 - skipped

SEQ ID NO: 2596 - DNA, 25 bp, Artificial Sequence
  Description of Artificial Sequence: Synthetic probe
gtcttgacctgtgtggtctgtcaat

SEQ ID NO: 2597 - DNA, 25 bp, Artificial Sequence
  Description of Artificial Sequence: Synthetic probe
ctatcgtgtagtgtgtccgaaagcc

SEQ ID NO: 2598 - DNA, 25 bp, Artificial Sequence
  Description of Artificial Sequence: Synthetic probe
agagacctcgtgtgtgcacttgcgg

SEQ ID NO: 2599 - skipped

SEQ ID NO: 2600 - DNA, 25 bp, Artificial Sequence
  Description of Artificial Sequence: Synthetic probe
gcgtttttgtgtgataaagtgcatc

SEQ ID NO: 2601 - DNA, 25 bp, Artificial Sequence
  Description of Artificial Sequence: Synthetic probe
tttccgatgtgtggtatgcttaggt

SEQ ID NO: 2602 - DNA, 25 bp, Artificial Sequence
  Description of Artificial Sequence: Synthetic probe
agaattgtgtgtgctctacggaaca

SEQ ID NO: 2603 - DNA, 25 bp, Artificial Sequence
  Description of Artificial Sequence: Synthetic probe
gcgtgagccgtgtgtgtatcccaaa

SEQ ID NO: 2604 - DNA, 25 bp, Artificial Sequence
  Description of Artificial Sequence: Synthetic probe
acaatttgtgtggtgtctgttctac

SEQ ID NO: 2605 - skipped

SEQ ID NO: 2606 - DNA, 25 bp, Artificial Sequence
  Description of Artificial Sequence: Synthetic probe
ccaattgtgtgtggttcgtcagcga

SEQ ID NO: 2607 - DNA, 25 bp, Artificial Sequence
  Description of Artificial Sequence: Synthetic probe
cgtttcctgtgtctgtgactactgt

SEQ ID NO: 2608 - DNA, 25 bp, Artificial Sequence
  Description of Artificial Sequence: Synthetic probe
catcgtgagtgtgtaggtgcactta

SEQ ID NO: 2609 - DNA, 25 bp, Artificial Sequence
  Description of Artificial Sequence: Synthetic probe
ataaacgagtgtgtgagcccttggt

SEQ ID NO: 2610 - skipped

SEQ ID NO: 2611 - DNA, 25 bp, Artificial Sequence
  Description of Artificial Sequence: Synthetic probe
atttcatgtgtgtgtcgactgccac

SEQ ID NO: 2612 - DNA, 25 bp, Artificial Sequence
  Description of Artificial Sequence: Synthetic probe
gtcagtctgatgtgtggtcgaccct

SEQ ID NO: 2613 - DNA, 25 bp, Artificial Sequence
  Description of Artificial Sequence: Synthetic probe
caaagtctgtgtgtcgctgtgtctc

SEQ ID NO: 2614 - DNA, 25 bp, Artificial Sequence
  Description of Artificial Sequence: Synthetic probe
acttcttgtgtgttgggtcctacta

SEQ ID NO: 2615 - DNA, 25 bp, Artificial Sequence
  Description of Artificial Sequence: Synthetic probe
ccgggtgtgtgttaactcacaagta

SEQ ID NO: 2616 - DNA, 25 bp, Artificial Sequence
  Description of Artificial Sequence: Synthetic probe
accggtcgtgtgtgtgctattccct

SEQ ID NO: 2617 - DNA, 25 bp, Artificial Sequence
  Description of Artificial Sequence: Synthetic probe
cgtagagtcgtctgtgtggacaaac

SEQ ID NO: 2618 - DNA, 25 bp, Artificial Sequence
  Description of Artificial Sequence: Synthetic probe
cctggtgtgtgtagtagtcttgtcc

SEQ ID NO: 2619 - DNA, 25 bp, Artificial Sequence
  Description of Artificial Sequence: Synthetic probe
tcaagtgttgtgtcgtcgtgtgtgt

SEQ ID NO: 2620 - DNA, 25 bp, Artificial Sequence
  Description of Artificial Sequence: Synthetic probe
caaagactgtgtgtgtcgagtcgtc

SEQ ID NO: 2621 - DNA, 25 bp, Artificial Sequence
  Description of Artificial Sequence: Synthetic probe
aaaactactgtgtgtaggaggtcat

SEQ ID NO: 2622 - skipped

SEQ ID NO: 2623 - DNA, 25 bp, Artificial Sequence
  Description of Artificial Sequence: Synthetic probe
acgtctggtgtgtgtttcaatttat

SEQ ID NO: 2624 - DNA, 25 bp, Artificial Sequence
  Description of Artificial Sequence: Synthetic probe
cgtcgtgtagtgtgtgtattcgtac

SEQ ID NO: 2625 - DNA, 25 bp, Artificial Sequence
  Description of Artificial Sequence: Synthetic probe
ctttccgtgtgtgcgacctttccga

SEQ ID NO: 2626 - DNA, 25 bp, Artificial Sequence
  Description of Artificial Sequence: Synthetic probe
ggcacatagtgtgtggttattttta

SEQ ID NO: 2627 - DNA, 25 bp, Artificial Sequence
  Description of Artificial Sequence: Synthetic probe
attcactgtgtgtgcccgttgacct

SEQ ID NO: 2628 - DNA, 25 bp, Artificial Sequence
  Description of Artificial Sequence: Synthetic probe
gtgcgtctgttgtgtcgagagtctt

SEQ ID NO: 2629 - DNA, 25 bp, Artificial Sequence
  Description of Artificial Sequence: Synthetic probe
actgaacgagtgtgtgaccgtgagc

SEQ ID NO: 2630 - DNA, 25 bp, Artificial Sequence
  Description of Artificial Sequence: Synthetic probe
acgactatgagtgtgtgccttgctt

SEQ ID NO: 2631 - DNA, 25 bp, Artificial Sequence
  Description of Artificial Sequence: Synthetic probe
gcttatggtgtgtgacactgtgtcc

SEQ ID NO: 2632 - DNA, 25 bp, Artificial Sequence
  Description of Artificial Sequence: Synthetic probe
acaaagagtgtgtggatgcttagaa

SEQ ID NO: 2633 - DNA, 25 bp, Artificial Sequence
  Description of Artificial Sequence: Synthetic probe
atttcagtgtgtcgtgtcatggtcg

SEQ ID NO: 2634 - DNA, 25 bp, Artificial Sequence
  Description of Artificial Sequence: Synthetic probe
gtaaaactcgtgtgtgagtgtccac

SEQ ID NO: 2635 - DNA, 25 bp, Artificial Sequence
  Description of Artificial Sequence: Synthetic probe
aagttggtgtgtgaggagacccttc

SEQ ID NO: 2636 - DNA, 25 bp, Artificial Sequence
  Description of Artificial Sequence: Synthetic probe
gtgtcttaagtgtgtgtttgccaaa

SEQ ID NO: 2637 - DNA, 25 bp, Artificial Sequence
  Description of Artificial Sequence: Synthetic probe
ctctatcggtgtgtgacaggagaca

SEQ ID NO: 2638 - DNA, 25 bp, Artificial Sequence
  Description of Artificial Sequence: Synthetic probe
tgtccactgtgtgtgaggtcccgta

SEQ ID NO: 2639 - DNA, 25 bp, Artificial Sequence
  Description of Artificial Sequence: Synthetic probe
actacctcagtgtgtggtcctttca

SEQ ID NO: 2640 - DNA, 25 bp, Artificial Sequence
  Description of Artificial Sequence: Synthetic probe
ctacctcgtgagtgtgtcagcccaa

SEQ ID NO: 2641 - DNA, 25 bp, Artificial Sequence
  Description of Artificial Sequence: Synthetic probe
cggcctcgtgtgtgcaggcttctca

SEQ ID NO: 2642 - DNA, 25 bp, Artificial Sequence
  Description of Artificial Sequence: Synthetic probe
cgtcacccgtgtgtgtgagagacac

SEQ ID NO: 2643 - DNA, 25 bp, Artificial Sequence
  Description of Artificial Sequence: Synthetic probe
gacgaccgcgtgtgtgtctccggcc

SEQ ID NO: 2644 - DNA, 25 bp, Artificial Sequence
  Description of Artificial Sequence: Synthetic probe
atttggtgtgttggagtcgctctac

SEQ ID NO: 2645 - DNA, 25 bp, Artificial Sequence
  Description of Artificial Sequence: Synthetic probe
accgtatgcgtgtgtatttcttccc

SEQ ID NO: 2646 - DNA, 25 bp, Artificial Sequence
  Description of Artificial Sequence: Synthetic probe
gtatgtactcgtgtgtgtgtaaatg

SEQ ID NO: 2647 - DNA, 25 bp, Artificial Sequence
  Description of Artificial Sequence: Synthetic probe
cgcatcagtgtgtgtgtacggtaga

SEQ ID NO: 2648 - DNA, 25 bp, Artificial Sequence
  Description of Artificial Sequence: Synthetic probe
ctcatatcgtgtgtggtactcggga

SEQ ID NO: 2649 - DNA, 25 bp, Artificial Sequence
  Description of Artificial Sequence: Synthetic probe
atatgtctcgtgtgtggagtacccg

SEQ ID NO: 2650 - DNA, 25 bp, Artificial Sequence
  Description of Artificial Sequence: Synthetic probe
tgtatgtactcgtgtgtgtgtaaat

SEQ ID NO: 2651 - DNA, 25 bp, Artificial Sequence
  Description of Artificial Sequence: Synthetic probe
cgtccctgtgtgtagttcgtcgctc

SEQ ID NO: 2652 - DNA, 25 bp, Artificial Sequence
  Description of Artificial Sequence: Synthetic probe
gcgtcttcgtgtgtgtcgtccagac

SEQ ID NO: 2653 - DNA, 25 bp, Artificial Sequence
  Description of Artificial Sequence: Synthetic probe
actcccactgtgtagagtgtgtgcg

SEQ ID NO: 2654 - DNA, 25 bp, Artificial Sequence
  Description of Artificial Sequence: Synthetic probe
cgctttcagtggtgtccggggccct

SEQ ID NO: 2655 - DNA, 25 bp, Artificial Sequence
  Description of Artificial Sequence: Synthetic probe
ataacataagtggtgtgtgcatccg

SEQ ID NO: 2656 - DNA, 25 bp, Artificial Sequence
  Description of Artificial Sequence: Synthetic probe
ttcgtggcgagtggacactctagtg

SEQ ID NO: 2657 - DNA, 25 bp, Artificial Sequence
  Description of Artificial Sequence: Synthetic probe
gtaagtggtcgagtggtctgtacac

SEQ ID NO: 2658 - DNA, 25 bp, Artificial Sequence
  Description of Artificial Sequence: Synthetic probe
aactgcctagtggtggtggaccctg

SEQ ID NO: 2659 - DNA, 25 bp, Artificial Sequence
  Description of Artificial Sequence: Synthetic probe
accgacacgacgagtgagttccctc

SEQ ID NO: 2660 - DNA, 25 bp, Artificial Sequence
  Description of Artificial Sequence: Synthetic probe
accttaaagtgtgtgggtcacttac

SEQ ID NO: 2661 - DNA, 25 bp, Artificial Sequence
  Description of Artificial Sequence: Synthetic probe
ccacattagtgtgtgccgtgtcatc

SEQ ID NO: 2662 - DNA, 25 bp, Artificial Sequence
  Description of Artificial Sequence: Synthetic probe
acttctgtagtagtgggtcctccct

SEQ ID NO: 2663 - DNA, 25 bp, Artificial Sequence
  Description of Artificial Sequence: Synthetic probe
cttatgtgtagtggtggaggcactc

SEQ ID NO: 2664 - DNA, 25 bp, Artificial Sequence
  Description of Artificial Sequence: Synthetic probe
actacctcgtgagtgtgtcagccca

SEQ ID NO: 2665 - DNA, 25 bp, Artificial Sequence
  Description of Artificial Sequence: Synthetic probe
atgagtcaagtgtgtgtctgtcgtt

SEQ ID NO: 2666 - DNA, 25 bp, Artificial Sequence
  Description of Artificial Sequence: Synthetic probe
tgtcgagagtgagtgtttgcctact

SEQ ID NO: 2667 - DNA, 25 bp, Artificial Sequence
  Description of Artificial Sequence: Synthetic probe
ctccggtagagtgtgtacggacact

SEQ ID NO: 2668 - DNA, 25 bp, Artificial Sequence
  Description of Artificial Sequence: Synthetic probe
aagagacgtgagtgtgccctctcct

SEQ ID NO: 2669 - DNA, 25 bp, Artificial Sequence
  Description of Artificial Sequence: Synthetic probe
cccacgcagtgtgtgtgtcctacga

SEQ ID NO: 2670 - DNA, 25 bp, Artificial Sequence
  Description of Artificial Sequence: Synthetic probe
accggtgtcagtgtgtggcgtggtg

SEQ ID NO: 2671 - DNA, 25 bp, Artificial Sequence
  Description of Artificial Sequence: Synthetic probe
tcagtgtgtcagtgtgtgccttcgt

SEQ ID NO: 2672 - DNA, 25 bp, Artificial Sequence
  Description of Artificial Sequence: Synthetic probe
ccgtgtgtcagtgtaggtgatgtcc

SEQ ID NO: 2673 - DNA, 25 bp, Artificial Sequence
  Description of Artificial Sequence: Synthetic probe
gtattgttcgagtgtgtacgcgcac

SEQ ID NO: 2674 - DNA, 25 bp, Artificial Sequence
  Description of Artificial Sequence: Synthetic probe
gccttccgagtgttacatgtcgtac

SEQ ID NO: 2675 - DNA, 25 bp, Artificial Sequence
  Description of Artificial Sequence: Synthetic probe
ctaacttctagtgtgtgtgttaaca

SEQ ID NO: 2676 - DNA, 25 bp, Artificial Sequence
  Description of Artificial Sequence: Synthetic probe
cccaacgagtgtgtcgtcactgagt

SEQ ID NO: 2677 - DNA, 25 bp, Artificial Sequence
  Description of Artificial Sequence: Synthetic probe
attgttcgagtgtgtacgcgcactt

SEQ ID NO: 2678 - DNA, 25 bp, Artificial Sequence
  Description of Artificial Sequence: Synthetic probe
ccaggcgagtgtgtatacgtcttgc

SEQ ID NO: 2679 - DNA, 25 bp, Artificial Sequence
  Description of Artificial Sequence: Synthetic probe
acacgcgtgtacgagtgtagccgac

SEQ ID NO: 2680 - DNA, 25 bp, Artificial Sequence
  Description of Artificial Sequence: Synthetic probe
gaaaatccgtttgtgttggacgaag

SEQ ID NO: 2681 - DNA, 25 bp, Artificial Sequence
  Description of Artificial Sequence: Synthetic probe
ctcaacgctagtgtgtggagacgtg

SEQ ID NO: 2682 - DNA, 25 bp, Artificial Sequence
  Description of Artificial Sequence: Synthetic probe
attattccgttggtgtgtgaagtgt

SEQ ID NO: 2683 - DNA, 25 bp, Artificial Sequence
  Description of Artificial Sequence: Synthetic probe
aagtacgagtccgttgttgtgactc

SEQ ID NO: 2684 - DNA, 25 bp, Artificial Sequence
  Description of Artificial Sequence: Synthetic probe
accaccgaccgttgaacacagggaa

SEQ ID NO: 2685 - DNA, 25 bp, Artificial Sequence
  Description of Artificial Sequence: Synthetic probe
cccgtagaccgttgtaggccgtatt

SEQ ID NO: 2686 - DNA, 25 bp, Artificial Sequence
  Description of Artificial Sequence: Synthetic probe
aggttcccgttatttcgtcgaggtg

SEQ ID NO: 2687 - DNA, 25 bp, Artificial Sequence
  Description of Artificial Sequence: Synthetic probe
ggacgacaccgcgttttcaacctgg

SEQ ID NO: 2688 - DNA, 25 bp, Artificial Sequence
  Description of Artificial Sequence: Synthetic probe
gaagattaccgttcttgttgttgat

SEQ ID NO: 2689 - DNA, 25 bp, Artificial Sequence
  Description of Artificial Sequence: Synthetic probe
ggtaaatgtcgttcttctcggtcgt

SEQ ID NO: 2690 - DNA, 25 bp, Artificial Sequence
  Description of Artificial Sequence: Synthetic probe
agagacgatctcgttgttccactcg

SEQ ID NO: 2691 - DNA, 25 bp, Artificial Sequence
  Description of Artificial Sequence: Synthetic probe
agtggtggtcgtttttgtatcggtt

SEQ ID NO: 2692 - DNA, 25 bp, Artificial Sequence
  Description of Artificial Sequence: Synthetic probe
ataatccgtcgttgtgcttcccaga

SEQ ID NO: 2693 - DNA, 25 bp, Artificial Sequence
  Description of Artificial Sequence: Synthetic probe
gtctgcgtcgtgtcgtttgtaaaaa

SEQ ID NO: 2694 - DNA, 25 bp, Artificial Sequence
  Description of Artificial Sequence: Synthetic probe
aacctctcgtcgtttggtcggtttc

SEQ ID NO: 2695 - DNA, 25 bp, Artificial Sequence
  Description of Artificial Sequence: Synthetic probe
ttgtgaacacgtttagtgtggtgtg

SEQ ID NO: 2696 - DNA, 25 bp, Artificial Sequence
  Description of Artificial Sequence: Synthetic probe
tggctgaacgttgtgtggttctgtt

SEQ ID NO: 2697 - DNA, 25 bp, Artificial Sequence
  Description of Artificial Sequence: Synthetic probe
cgttgcgagcgtgcaggctgtcgtg

SEQ ID NO: 2698 - DNA, 25 bp, Artificial Sequence
  Description of Artificial Sequence: Synthetic probe
ctttgtgcgtgactattcgatgtgg

SEQ ID NO: 2699 - DNA, 25 bp, Artificial Sequence
  Description of Artificial Sequence: Synthetic probe
cctggtgcgtgcatagagaactctt

SEQ ID NO: 2700 - DNA, 25 bp, Artificial Sequence
  Description of Artificial Sequence: Synthetic probe
actctgaagcgtgcgtaccgaacct

SEQ ID NO: 2701 - DNA, 25 bp, Artificial Sequence
  Description of Artificial Sequence: Synthetic probe
atctacttgcgtgcgactgtgcatc

SEQ ID NO: 2702 - skipped

SEQ ID NO: 2703 - DNA, 25 bp, Artificial Sequence
  Description of Artificial Sequence: Synthetic probe
ctgggtagcgtgggtcacgttcatc

SEQ ID NO: 2704 - DNA, 25 bp, Artificial Sequence
  Description of Artificial Sequence: Synthetic probe
agcatacggcgtgcgtacagcgtct

SEQ ID NO: 2705 - DNA, 25 bp, Artificial Sequence
  Description of Artificial Sequence: Synthetic probe
tcgtcctgtgcgtgaacggccagga

SEQ ID NO: 2706 - DNA, 25 bp, Artificial Sequence
  Description of Artificial Sequence: Synthetic probe
aatttgcgtgctgtgggtaacttgt

SEQ ID NO: 2707 - DNA, 25 bp, Artificial Sequence
  Description of Artificial Sequence: Synthetic probe
acagctcggcgtgcgtgacgcacag

SEQ ID NO: 2708 - DNA, 25 bp, Artificial Sequence
  Description of Artificial Sequence: Synthetic probe
cgaaccgtgcgtgctacgggaagaa

SEQ ID NO: 2709 - DNA, 25 bp, Artificial Sequence
  Description of Artificial Sequence: Synthetic probe
aggtgcgtccgtggagtcccactac

SEQ ID NO: 2710 - DNA, 25 bp, Artificial Sequence
  Description of Artificial Sequence: Synthetic probe
cgtagacgagtgcgtgcgacgacta

SEQ ID NO: 2711 - DNA, 25 bp, Artificial Sequence
  Description of Artificial Sequence: Synthetic probe
tgtacgtgtacgtgcgtgcgcgcgt

SEQ ID NO: 2712 - DNA, 25 bp, Artificial Sequence
  Description of Artificial Sequence: Synthetic probe
agtggtggcgtgactgattcgtcca

SEQ ID NO: 2713 - DNA, 25 bp, Artificial Sequence
  Description of Artificial Sequence: Synthetic probe
gcggtgcgtctcgtgatcccgctac

SEQ ID NO: 2714 - DNA, 25 bp, Artificial Sequence
  Description of Artificial Sequence: Synthetic probe
cgcgaggtgcgtgaaaacaaataag

SEQ ID NO: 2715 - DNA, 25 bp, Artificial Sequence
  Description of Artificial Sequence: Synthetic probe
cgttgtgttcgtgcgtttggtttcc

SEQ ID NO: 2716 - DNA, 25 bp, Artificial Sequence
  Description of Artificial Sequence: Synthetic probe
actcatggtcgtgctggtagtcatt

SEQ ID NO: 2717 - DNA, 25 bp, Artificial Sequence
  Description of Artificial Sequence: Synthetic probe
cttctattcgtggtgtgtctatacc

SEQ ID NO: 2718 - DNA, 25 bp, Artificial Sequence
  Description of Artificial Sequence: Synthetic probe
gtgaactgtgcgtgtattacctcct

SEQ ID NO: 2719 - DNA, 25 bp, Artificial Sequence
  Description of Artificial Sequence: Synthetic probe
aactctctgcgtgtggtggcagacc

SEQ ID NO: 2720 - DNA, 25 bp, Artificial Sequence
  Description of Artificial Sequence: Synthetic probe
aagttggcgtgtttgcgtccgtgcc

SEQ ID NO: 2721 - DNA, 25 bp, Artificial Sequence
  Description of Artificial Sequence: Synthetic probe
acgtgtcttgcgtgtgtcacgtgcc

SEQ ID NO: 2722 - DNA, 25 bp, Artificial Sequence
  Description of Artificial Sequence: Synthetic probe
ctctttagtcgtgagtgtgggtcaa

SEQ ID NO: 2723 - DNA, 25 bp, Artificial Sequence
  Description of Artificial Sequence: Synthetic probe
gtgtgaatccgtgtttgtggtttag

SEQ ID NO: 2724 - DNA, 25 bp, Artificial Sequence
  Description of Artificial Sequence: Synthetic probe
ttccgtgtgcgtgtctctccctcta

SEQ ID NO: 2725 - DNA, 25 bp, Artificial Sequence
  Description of Artificial Sequence: Synthetic probe
cgtcgtctgtccgtgtgtcgtcggc

SEQ ID NO: 2726 - DNA, 25 bp, Artificial Sequence
  Description of Artificial Sequence: Synthetic probe
cctaaacgcgtgtgtctgttgaaaa

SEQ ID NO: 2727 - DNA, 25 bp, Artificial Sequence
  Description of Artificial Sequence: Synthetic probe
gcaccgggtcgtgtgtcttgagacc

SEQ ID NO: 2728 - DNA, 25 bp, Artificial Sequence
  Description of Artificial Sequence: Synthetic probe
gttttacttcgtgtgtggtctcagg

SEQ ID NO: 2729 - DNA, 25 bp, Artificial Sequence
  Description of Artificial Sequence: Synthetic probe
ggtccacacgcgtgtgtgtcagtag

SEQ ID NO: 2730 - DNA, 25 bp, Artificial Sequence
  Description of Artificial Sequence: Synthetic probe
acgaatgatcgtgtgtgttactcct

SEQ ID NO: 2731 - DNA, 25 bp, Artificial Sequence
  Description of Artificial Sequence: Synthetic probe
caccatgcgtgtggtcgtcgtagtc

SEQ ID NO: 2732 - DNA, 25 bp, Artificial Sequence
  Description of Artificial Sequence: Synthetic probe
aaataagtcgtgtgtgtctcatccc

SEQ ID NO: 2733 - DNA, 25 bp, Artificial Sequence
  Description of Artificial Sequence: Synthetic probe
atgtgtgttcgtgtacacgtgtgta

SEQ ID NO: 2734 - DNA, 25 bp, Artificial Sequence
  Description of Artificial Sequence: Synthetic probe
taagatttcgtgtggtcgtgtcgcc

SEQ ID NO: 2735 - DNA, 25 bp, Artificial Sequence
  Description of Artificial Sequence: Synthetic probe
tggcctatcgtgtcgggtgtacaat

SEQ ID NO: 2736 - DNA, 25 bp, Artificial Sequence
  Description of Artificial Sequence: Synthetic probe
taaacacacacgtggcgcagaggtc

SEQ ID NO: 2737 - DNA, 25 bp, Artificial Sequence
  Description of Artificial Sequence: Synthetic probe
tttgggtcgtgtgtagtgtatgtgt

SEQ ID NO: 2738 - DNA, 25 bp, Artificial Sequence
  Description of Artificial Sequence: Synthetic probe
gacacttgacgtcgtgtgtgtggta

SEQ ID NO: 2739 - DNA, 25 bp, Artificial Sequence
  Description of Artificial Sequence: Synthetic probe
acgttggtgtcgtgtctactagacc

SEQ ID NO: 2740 - DNA, 25 bp, Artificial Sequence
  Description of Artificial Sequence: Synthetic probe
cacgttctaacgtgggtgttgaccc

SEQ ID NO: 2741 - DNA, 25 bp, Artificial Sequence
  Description of Artificial Sequence: Synthetic probe
cacgtgtacgtgtacgtgcgtgcgc

SEQ ID NO: 2742 - DNA, 25 bp, Artificial Sequence
  Description of Artificial Sequence: Synthetic probe
gtgctttcggtcagggtgttactac

SEQ ID NO: 2743 - DNA, 25 bp, Artificial Sequence
  Description of Artificial Sequence: Synthetic probe
tatgtggtggtcagtagtagtaacc

SEQ ID NO: 2744 - DNA, 25 bp, Artificial Sequence
  Description of Artificial Sequence: Synthetic probe
ttcggtgtcggtcaacattatgtaa

SEQ ID NO: 2745 - DNA, 25 bp, Artificial Sequence
  Description of Artificial Sequence: Synthetic probe
gtgtgctgtggtcatcagttgtgac

SEQ ID NO: 2746 - DNA, 25 bp, Artificial Sequence
  Description of Artificial Sequence: Synthetic probe
agtgggtcggtctagcttacttagt

SEQ ID NO: 2747 - DNA, 25 bp, Artificial Sequence
  Description of Artificial Sequence: Synthetic probe
cactcgtgctgtcctgtggactcgg

SEQ ID NO: 2748 - DNA, 25 bp, Artificial Sequence
  Description of Artificial Sequence: Synthetic probe
gtcagtgtggtgtcctgttttcgtt

SEQ ID NO: 2749 - DNA, 25 bp, Artificial Sequence
  Description of Artificial Sequence: Synthetic probe
gaccagtgtgtgtcctcgtgtctgt

SEQ ID NO: 2750 - DNA, 25 bp, Artificial Sequence
  Description of Artificial Sequence: Synthetic probe
cgtttggtgtccgatgtttttaaat

SEQ ID NO: 2751 - DNA, 25 bp, Artificial Sequence
  Description of Artificial Sequence: Synthetic probe
tttataacgtgtcctgtgtgtgatt

SEQ ID NO: 2752 - DNA, 25 bp, Artificial Sequence
  Description of Artificial Sequence: Synthetic probe
aggtgggtgtcagtgagtaccctcc

SEQ ID NO: 2753 - DNA, 25 bp, Artificial Sequence
  Description of Artificial Sequence: Synthetic probe
gtgggtgggtctctttagagattaa

SEQ ID NO: 2754 - DNA, 25 bp, Artificial Sequence
  Description of Artificial Sequence: Synthetic probe
tgtgtggtgtgtcacgtgtacacgt

SEQ ID NO: 2755 - DNA, 25 bp, Artificial Sequence
  Description of Artificial Sequence: Synthetic probe
cttggtggtctgaaggtatgtaaac

SEQ ID NO: 2756 - DNA, 25 bp, Artificial Sequence
  Description of Artificial Sequence: Synthetic probe
ttaccgttggtctgttggctgtaca

SEQ ID NO: 2757 - DNA, 25 bp, Artificial Sequence
  Description of Artificial Sequence: Synthetic probe
atagtgtgtcggtctgtatgtgaga

SEQ ID NO: 2758 - DNA, 25 bp, Artificial Sequence
  Description of Artificial Sequence: Synthetic probe
aaattgtgtcttggggtatcggtct

SEQ ID NO: 2759 - DNA, 25 bp, Artificial Sequence
  Description of Artificial Sequence: Synthetic probe
acaccgtcttgtctaacttcttcaa

SEQ ID NO: 2760 - DNA, 25 bp, Artificial Sequence
  Description of Artificial Sequence: Synthetic probe
acaccggttgtcttttgtgtctgaa

SEQ ID NO: 2761 - DNA, 25 bp, Artificial Sequence
  Description of Artificial Sequence: Synthetic probe
ggtggcggtgtctatgctccctcca

SEQ ID NO: 2762 - DNA, 25 bp, Artificial Sequence
  Description of Artificial Sequence: Synthetic probe
cgtccgagtgtgtcttgataatcgt

SEQ ID NO: 2763 - DNA, 25 bp, Artificial Sequence
  Description of Artificial Sequence: Synthetic probe
actaaactgtgtctgtcgccctgac

SEQ ID NO: 2764 - DNA, 25 bp, Artificial Sequence
  Description of Artificial Sequence: Synthetic probe
gacatactgtgtgtctgctcttcac

SEQ ID NO: 2765 - DNA, 25 bp, Artificial Sequence
  Description of Artificial Sequence: Synthetic probe
ggtggcggtgtctgtgctcccgcca

SEQ ID NO: 2766 - DNA, 25 bp, Artificial Sequence
  Description of Artificial Sequence: Synthetic probe
ggtggtggtgtctgtgctccctcca

SEQ ID NO: 2767 - DNA, 25 bp, Artificial Sequence
  Description of Artificial Sequence: Synthetic probe
acgagccgtgtgtctgtctaaaagt

SEQ ID NO: 2768 - DNA, 25 bp, Artificial Sequence
  Description of Artificial Sequence: Synthetic probe
tttatagtctgtctgggtcgtccct

SEQ ID NO: 2769 - DNA, 25 bp, Artificial Sequence
  Description of Artificial Sequence: Synthetic probe
acctgtgtgtgtctaaagcatctcc

SEQ ID NO: 2770 - DNA, 25 bp, Artificial Sequence
  Description of Artificial Sequence: Synthetic probe
agttcagatgtctgttgtggtgtct

SEQ ID NO: 2771 - DNA, 25 bp, Artificial Sequence
  Description of Artificial Sequence: Synthetic probe
aggctactatgtctatataatgtcc

SEQ ID NO: 2772 - DNA, 25 bp, Artificial Sequence
  Description of Artificial Sequence: Synthetic probe
tacgccctccgtccaagggctcctc

SEQ ID NO: 2773 - DNA, 25 bp, Artificial Sequence
  Description of Artificial Sequence: Synthetic probe
actactcgtcgtgtgtctgccgtaa

SEQ ID NO: 2774 - DNA, 25 bp, Artificial Sequence
  Description of Artificial Sequence: Synthetic probe
aacgtttgtgtctcggggtctctag

SEQ ID NO: 2775 - DNA, 25 bp, Artificial Sequence
  Description of Artificial Sequence: Synthetic probe
ttgcggcgtgtctaaatagtagagc

SEQ ID NO: 2776 - DNA, 25 bp, Artificial Sequence
  Description of Artificial Sequence: Synthetic probe
agaaccgaagtcaaccgctcgaacc

SEQ ID NO: 2777 - DNA, 25 bp, Artificial Sequence
  Description of Artificial Sequence: Synthetic probe
acttcaccagtccaagttggtcatg

SEQ ID NO: 2778 - DNA, 25 bp, Artificial Sequence
  Description of Artificial Sequence: Synthetic probe
gttcttacaagtccgtgtgtgcgca

SEQ ID NO: 2779 - DNA, 25 bp, Artificial Sequence
  Description of Artificial Sequence: Synthetic probe
aaataatagtcgagagggtggtaga

SEQ ID NO: 2780 - DNA, 25 bp, Artificial Sequence
  Description of Artificial Sequence: Synthetic probe
ctaatcaagtcagtgtcgtgtgtcg

SEQ ID NO: 2781 - DNA, 25 bp, Artificial Sequence
  Description of Artificial Sequence: Synthetic probe
ttgaaccgtagtccgtgtgagtgct

SEQ ID NO: 2782 - DNA, 25 bp, Artificial Sequence
  Description of Artificial Sequence: Synthetic probe
agtcgtttgagtcttgttttcagtc

SEQ ID NO: 2783 - DNA, 25 bp, Artificial Sequence
  Description of Artificial Sequence: Synthetic probe
cgcgcctcgagtctgtgtgcaggta

SEQ ID NO: 2784 - DNA, 25 bp, Artificial Sequence
  Description of Artificial Sequence: Synthetic probe
atttattagtctgtgtgtgatgtga

SEQ ID NO: 2785 - DNA, 25 bp, Artificial Sequence
  Description of Artificial Sequence: Synthetic probe
gacccggtgtagtctgtgtgtcatt

SEQ ID NO: 2786 - DNA, 25 bp, Artificial Sequence
  Description of Artificial Sequence: Synthetic probe
cggaccgggtcggttggaccgtgtc

SEQ ID NO: 2787 - DNA, 25 bp, Artificial Sequence
  Description of Artificial Sequence: Synthetic probe
tttgtttgtcgcgagcggcttccca

SEQ ID NO: 2788 - DNA, 25 bp, Artificial Sequence
  Description of Artificial Sequence: Synthetic probe
gtctatgttggtcggaacataactg

SEQ ID NO: 2789 - DNA, 25 bp, Artificial Sequence
  Description of Artificial Sequence: Synthetic probe
ccgtggggtcggtacctcgtgaaac

SEQ ID NO: 2790 - DNA, 25 bp, Artificial Sequence
  Description of Artificial Sequence: Synthetic probe
tctctaggtcggtcggtgtttaagg

SEQ ID NO: 2791 - DNA, 25 bp, Artificial Sequence
  Description of Artificial Sequence: Synthetic probe
ctttgtgtgtcgttatgaaatttgc

SEQ ID NO: 2792 - DNA, 25 bp, Artificial Sequence
  Description of Artificial Sequence: Synthetic probe
ttgaaatgtcgaagtgtgtgggtcc

SEQ ID NO: 2793 - DNA, 25 bp, Artificial Sequence
  Description of Artificial Sequence: Synthetic probe
gtacaaagttgtcggttttgtgaaa

SEQ ID NO: 2794 - DNA, 25 bp, Artificial Sequence
  Description of Artificial Sequence: Synthetic probe
agacctgggtcgacgtatcttctgt

SEQ ID NO: 2795 - DNA, 25 bp, Artificial Sequence
  Description of Artificial Sequence: Synthetic probe
gtgtttgggtcgtgtgtagtgtatg

SEQ ID NO: 2796 - DNA, 25 bp, Artificial Sequence
  Description of Artificial Sequence: Synthetic probe
gtctatcggtgtgtcgccagtttac

SEQ ID NO: 2797 - DNA, 25 bp, Artificial Sequence
  Description of Artificial Sequence: Synthetic probe
acaagtgtgtgtcggtgcaacctcc

SEQ ID NO: 2798 - DNA, 25 bp, Artificial Sequence
  Description of Artificial Sequence: Synthetic probe
tggctcgtgtgtcgaagtcctccct

SEQ ID NO: 2799 - DNA, 25 bp, Artificial Sequence
  Description of Artificial Sequence: Synthetic probe
aacctgtggtcgtgtgcctgtttga

SEQ ID NO: 2800 - DNA, 25 bp, Artificial Sequence
  Description of Artificial Sequence: Synthetic probe
aaatcgtgtgtcgttttgtacttca

SEQ ID NO: 2801 - DNA, 25 bp, Artificial Sequence
  Description of Artificial Sequence: Synthetic probe
accaatggtcgttccgtcgtgtcta

SEQ ID NO: 2802 - DNA, 25 bp, Artificial Sequence
  Description of Artificial Sequence: Synthetic probe
ccttctcggtcgttggtgcacatag

SEQ ID NO: 2803 - DNA, 25 bp, Artificial Sequence
  Description of Artificial Sequence: Synthetic probe
ccgtgtagtgtgtcgacgtgtactt

SEQ ID NO: 2804 - DNA, 25 bp, Artificial Sequence
  Description of Artificial Sequence: Synthetic probe
attatgatgtcgtgtggttcccaat

SEQ ID NO: 2805 - DNA, 25 bp, Artificial Sequence
  Description of Artificial Sequence: Synthetic probe
gtcctagtgggtcgtgtcgacgtac

SEQ ID NO: 2806 - DNA, 25 bp, Artificial Sequence
  Description of Artificial Sequence: Synthetic probe
actattttgtcgtggtgtattgcgt

SEQ ID NO: 2807 - DNA, 25 bp, Artificial Sequence
  Description of Artificial Sequence: Synthetic probe
ttgtccttgtcgttgtgtgcccgtg

SEQ ID NO: 2808 - DNA, 25 bp, Artificial Sequence
  Description of Artificial Sequence: Synthetic probe
atgaggttgtcgtgtttggtactag

SEQ ID NO: 2809 - DNA, 25 bp, Artificial Sequence
  Description of Artificial Sequence: Synthetic probe
tcctggtgtgtcgtctcgtggacca

SEQ ID NO: 2810 - DNA, 25 bp, Artificial Sequence
  Description of Artificial Sequence: Synthetic probe
agggtagaccgtccattgccgctta

SEQ ID NO: 2811 - DNA, 25 bp, Artificial Sequence
  Description of Artificial Sequence: Synthetic probe
cgcgccccgtcacccgccgcgtagg

SEQ ID NO: 2812 - DNA, 25 bp, Artificial Sequence
  Description of Artificial Sequence: Synthetic probe
gggacctccgtcctacagacttttg

SEQ ID NO: 2813 - DNA, 25 bp, Artificial Sequence
  Description of Artificial Sequence: Synthetic probe
gtttgtgtccgtcctaataagagtg

SEQ ID NO: 2814 - DNA, 25 bp, Artificial Sequence
  Description of Artificial Sequence: Synthetic probe
gacctctggcgtctgttgtgtctgc

SEQ ID NO: 2815 - DNA, 25 bp, Artificial Sequence
  Description of Artificial Sequence: Synthetic probe
ggatatcatcgtcagaagtgattaa

SEQ ID NO: 2816 - DNA, 25 bp, Artificial Sequence
  Description of Artificial Sequence: Synthetic probe
cttccgccgtctttttctgatggtc

SEQ ID NO: 2817 - skipped

SEQ ID NO: 2818 - DNA, 25 bp, Artificial Sequence
  Description of Artificial Sequence: Synthetic probe
tgaagcgtgcgtcgtggtctccgac

SEQ ID NO: 2819 - DNA, 25 bp, Artificial Sequence
  Description of Artificial Sequence: Synthetic probe
cgacccacgacgtcacatatagaaa

SEQ ID NO: 2820 - DNA, 25 bp, Artificial Sequence
  Description of Artificial Sequence: Synthetic probe
tcctacacacacgtcttaagtgagt

SEQ ID NO: 2821 - DNA, 25 bp, Artificial Sequence
  Description of Artificial Sequence: Synthetic probe
acgacctcgaccgtcgatcgcggag

SEQ ID NO: 2822 - skipped

SEQ ID NO: 2823 - DNA, 25 bp, Artificial Sequence
  Description of Artificial Sequence: Synthetic probe
attcggtttaagtttgtggtgagac

SEQ ID NO: 2824 - DNA, 25 bp, Artificial Sequence
  Description of Artificial Sequence: Synthetic probe
gtggtggtgttaatacgtcaactca

SEQ ID NO: 2825 - DNA, 25 bp, Artificial Sequence
  Description of Artificial Sequence: Synthetic probe
gtcccgacgacgttaacattatcca

SEQ ID NO: 2826 - DNA, 25 bp, Artificial Sequence
  Description of Artificial Sequence: Synthetic probe
caccgttttataggatctgaaagtc

SEQ ID NO: 2827 - DNA, 25 bp, Artificial Sequence
  Description of Artificial Sequence: Synthetic probe
ctatacttgttaaggtggtggtcgg

SEQ ID NO: 2828 - DNA, 25 bp, Artificial Sequence
  Description of Artificial Sequence: Synthetic probe
accgatgtagttattcgtgtgtggt

SEQ ID NO: 2829 - DNA, 25 bp, Artificial Sequence
  Description of Artificial Sequence: Synthetic probe
accgggattatgtgtgtgacgactc

SEQ ID NO: 2830 - DNA, 25 bp, Artificial Sequence
  Description of Artificial Sequence: Synthetic probe
agattctacttatggtgtgtgaggt

SEQ ID NO: 2831 - DNA, 25 bp, Artificial Sequence
  Description of Artificial Sequence: Synthetic probe
tcacgttgcttattcggtgtgtgtc

SEQ ID NO: 2832 - DNA, 25 bp, Artificial Sequence
  Description of Artificial Sequence: Synthetic probe
atattctgttatgtgtgtgttccct

SEQ ID NO: 2833 - DNA, 25 bp, Artificial Sequence
  Description of Artificial Sequence: Synthetic probe
cggtcagaataaacgaataaaaagg

SEQ ID NO: 2834 - DNA, 25 bp, Artificial Sequence
  Description of Artificial Sequence: Synthetic probe
acgtagtgtggttataggtgtgtca

SEQ ID NO: 2835 - DNA, 25 bp, Artificial Sequence
  Description of Artificial Sequence: Synthetic probe
gtgtcggaccgatatgtcacgtagg

SEQ ID NO: 2836 - skipped

SEQ ID NO: 2837 - DNA, 25 bp, Artificial Sequence
  Description of Artificial Sequence: Synthetic probe
tccaatttaggagggctgtgtggtc

SEQ ID NO: 2838 - DNA, 25 bp, Artificial Sequence
  Description of Artificial Sequence: Synthetic probe
agtggttgttagctcagaggttgtc

SEQ ID NO: 2839 - DNA, 25 bp, Artificial Sequence
  Description of Artificial Sequence: Synthetic probe
tcgattaagttaggtcgtcggtctc

SEQ ID NO: 2840 - DNA, 25 bp, Artificial Sequence
  Description of Artificial Sequence: Synthetic probe
gtgaacacgtttagtgtggtgtgtc

SEQ ID NO: 2841 - DNA, 25 bp, Artificial Sequence
  Description of Artificial Sequence: Synthetic probe
atgtgcgtgttagtcttgtggtgta

SEQ ID NO: 2842 - DNA, 25 bp, Artificial Sequence
  Description of Artificial Sequence: Synthetic probe
cttacgactaataggtgtgtgcgcg

SEQ ID NO: 2843 - DNA, 25 bp, Artificial Sequence
  Description of Artificial Sequence: Synthetic probe
ccctgtgatagggtcgtgtgtaccc

SEQ ID NO: 2844 - DNA, 25 bp, Artificial Sequence
  Description of Artificial Sequence: Synthetic probe
gtccgtcgaccatagacaagcgtcc

SEQ ID NO: 2845 - DNA, 25 bp, Artificial Sequence
  Description of Artificial Sequence: Synthetic probe
acgtgggacctaaacgtatgtaaga

SEQ ID NO: 2846 - DNA, 25 bp, Artificial Sequence
  Description of Artificial Sequence: Synthetic probe
cacctctctctatgtggtgtgacgg

SEQ ID NO: 2847 - DNA, 25 bp, Artificial Sequence
  Description of Artificial Sequence: Synthetic probe
ctgtgtcctctatgtgtgtgtgaca

SEQ ID NO: 2848 - DNA, 25 bp, Artificial Sequence
  Description of Artificial Sequence: Synthetic probe
aattaagtctattgagtggtggtgg

SEQ ID NO: 2849 - DNA, 25 bp, Artificial Sequence
  Description of Artificial Sequence: Synthetic probe
gttctccagtactaacgtcttctcc

SEQ ID NO: 2850 - DNA, 25 bp, Artificial Sequence
  Description of Artificial Sequence: Synthetic probe
cgttcacacactatcttactaaatt

SEQ ID NO: 2851 - DNA, 25 bp, Artificial Sequence
  Description of Artificial Sequence: Synthetic probe
catcacacacgtatcaccacacaca

SEQ ID NO: 2852 - DNA, 25 bp, Artificial Sequence
  Description of Artificial Sequence: Synthetic probe
ctgttcatctagaggtgtggtgtta

SEQ ID NO: 2853 - DNA, 25 bp, Artificial Sequence
  Description of Artificial Sequence: Synthetic probe
ctaccccctagttgtgtgtggaagt

SEQ ID NO: 2854 - DNA, 25 bp, Artificial Sequence
  Description of Artificial Sequence: Synthetic probe
gtcgggtctgttactctacgttctc

SEQ ID NO: 2855 - DNA, 25 bp, Artificial Sequence
  Description of Artificial Sequence: Synthetic probe
actatgtgcatacgtgtcgtgtgtc

SEQ ID NO: 2856 - DNA, 25 bp, Artificial Sequence
  Description of Artificial Sequence: Synthetic probe
agacaaacctacacacacacgggag

SEQ ID NO: 2857 - DNA, 25 bp, Artificial Sequence
  Description of Artificial Sequence: Synthetic probe
atgtacctacctacaagtctcggac

SEQ ID NO: 2858 - DNA, 25 bp, Artificial Sequence
  Description of Artificial Sequence: Synthetic probe
agacgaaacactacgacgccgtccg

SEQ ID NO: 2859 - DNA, 25 bp, Artificial Sequence
  Description of Artificial Sequence: Synthetic probe
tcgtgcgtgaactacgggtcgagac

SEQ ID NO: 2860 - DNA, 25 bp, Artificial Sequence
  Description of Artificial Sequence: Synthetic probe
ctaccggactctacgagtttgtcta

SEQ ID NO: 2861 - DNA, 25 bp, Artificial Sequence
  Description of Artificial Sequence: Synthetic probe
ggaccgtttgtaatcttatatgttc

SEQ ID NO: 2862 - DNA, 25 bp, Artificial Sequence
  Description of Artificial Sequence: Synthetic probe
ctattgttgtaatccgtgtttgaag

SEQ ID NO: 2863 - DNA, 25 bp, Artificial Sequence
  Description of Artificial Sequence: Synthetic probe
ggtggtggtgtaatcgaatctatac

SEQ ID NO: 2864 - DNA, 25 bp, Artificial Sequence
  Description of Artificial Sequence: Synthetic probe
gtttgtgtgtgtaaatattgaacta

SEQ ID NO: 2865 - DNA, 25 bp, Artificial Sequence
  Description of Artificial Sequence: Synthetic probe
tgtgatgtgtgtatgttgaatgtgt

SEQ ID NO: 2866 - DNA, 25 bp, Artificial Sequence
  Description of Artificial Sequence: Synthetic probe
tggtctgttgtatcagtctgtgccc

SEQ ID NO: 2867 - DNA, 25 bp, Artificial Sequence
  Description of Artificial Sequence: Synthetic probe
agtgtggcgtgtatctctacccatc

SEQ ID NO: 2868 - DNA, 25 bp, Artificial Sequence
  Description of Artificial Sequence: Synthetic probe
cgtgtagtgtgtgtattcgtacttt

SEQ ID NO: 2869 - DNA, 25 bp, Artificial Sequence
  Description of Artificial Sequence: Synthetic probe
tgtttaaagtattcgaggtggagct

SEQ ID NO: 2870 - DNA, 25 bp, Artificial Sequence
  Description of Artificial Sequence: Synthetic probe
cttgtaacgagtaatccggtcgttg

SEQ ID NO: 2871 - skipped

SEQ ID NO: 2872 - DNA, 25 bp, Artificial Sequence
  Description of Artificial Sequence: Synthetic probe
ctaggtcggtgtagtgtggtcctaa

SEQ ID NO: 2873 - DNA, 25 bp, Artificial Sequence
  Description of Artificial Sequence: Synthetic probe
tagtacctccggtagtggtgggcta

SEQ ID NO: 2874 - DNA, 25 bp, Artificial Sequence
  Description of Artificial Sequence: Synthetic probe
tttccttgtagagcgtgtgttcaca

SEQ ID NO: 2875 - DNA, 25 bp, Artificial Sequence
  Description of Artificial Sequence: Synthetic probe
cccactgtgtagagtgtgtgcgtac

SEQ ID NO: 2876 - DNA, 25 bp, Artificial Sequence
  Description of Artificial Sequence: Synthetic probe
actaggtcggtgtagtgtggtccta

SEQ ID NO: 2877 - DNA, 25 bp, Artificial Sequence
  Description of Artificial Sequence: Synthetic probe
ctcctatccgtagtcgacgtgtttg

SEQ ID NO: 2878 - DNA, 25 bp, Artificial Sequence
  Description of Artificial Sequence: Synthetic probe
gtgtttcacacgtaacccacacacg

SEQ ID NO: 2879 - DNA, 25 bp, Artificial Sequence
  Description of Artificial Sequence: Synthetic probe
agtcgttccgcgtagtgtgttttcc

SEQ ID NO: 2880 - DNA, 25 bp, Artificial Sequence
  Description of Artificial Sequence: Synthetic probe
acccacacacgtactcgcacctggg

SEQ ID NO: 2881 - DNA, 25 bp, Artificial Sequence
  Description of Artificial Sequence: Synthetic probe
agagaacgggtacgtatgagacttc

SEQ ID NO: 2882 - DNA, 25 bp, Artificial Sequence
  Description of Artificial Sequence: Synthetic probe
tacgtcaggggtactgttgtttact

SEQ ID NO: 2883 - skipped

SEQ ID NO: 2884 - DNA, 25 bp, Artificial Sequence
  Description of Artificial Sequence: Synthetic probe
acccgatcagtacattggaggtcct

SEQ ID NO: 2885 - DNA, 25 bp, Artificial Sequence
  Description of Artificial Sequence: Synthetic probe
gacctacctacggtactaccaggac

SEQ ID NO: 2886 - DNA, 25 bp, Artificial Sequence
  Description of Artificial Sequence: Synthetic probe
tgtcgagtgtgtacgtacacttgtg

SEQ ID NO: 2887 - DNA, 25 bp, Artificial Sequence
  Description of Artificial Sequence: Synthetic probe
gtgtcgagtgtgtacgtacacttgt

SEQ ID NO: 2888 - DNA, 25 bp, Artificial Sequence
  Description of Artificial Sequence: Synthetic probe
cccacacacgtactcgcacctgggc

SEQ ID NO: 2889 - DNA, 25 bp, Artificial Sequence
  Description of Artificial Sequence: Synthetic probe
tgttcgagtgtgtacgcgcactttt

SEQ ID NO: 2890 - DNA, 25 bp, Artificial Sequence
  Description of Artificial Sequence: Synthetic probe
ccgaatatccgccatcaaaggagtc

SEQ ID NO: 2891 - DNA, 25 bp, Artificial Sequence
  Description of Artificial Sequence: Synthetic probe
ctccacgcccggccgcgccagcccg

SEQ ID NO: 2892 - DNA, 25 bp, Artificial Sequence
  Description of Artificial Sequence: Synthetic probe
ctacgagaggcccagacacggctcc

SEQ ID NO: 2893 - DNA, 25 bp, Artificial Sequence
  Description of Artificial Sequence: Synthetic probe
attttgcccgccgtcctatgccgcg

SEQ ID NO: 2894 - DNA, 25 bp, Artificial Sequence
  Description of Artificial Sequence: Synthetic probe
gtttgggcccgacacgttgttcaca

SEQ ID NO: 2895 - DNA, 25 bp, Artificial Sequence
  Description of Artificial Sequence: Synthetic probe
gccgcgccgcccgatatatcgtcct

SEQ ID NO: 2896 - DNA, 25 bp, Artificial Sequence
  Description of Artificial Sequence: Synthetic probe
agccgacgcccatataaggttaagg

SEQ ID NO: 2897 - DNA, 25 bp, Artificial Sequence
  Description of Artificial Sequence: Synthetic probe
ctccacgtcccaagtccagaaatta

SEQ ID NO: 2898 - DNA, 25 bp, Artificial Sequence
  Description of Artificial Sequence: Synthetic probe
ggacccgacccaagggcctctacag

SEQ ID NO: 2899 - DNA, 25 bp, Artificial Sequence
  Description of Artificial Sequence: Synthetic probe
agacacagacccatcgtcacggggt

SEQ ID NO: 2900 - DNA, 25 bp, Artificial Sequence
  Description of Artificial Sequence: Synthetic probe
gttcttatcccagaccgacctaagg

SEQ ID NO: 2901 - DNA, 25 bp, Artificial Sequence
  Description of Artificial Sequence: Synthetic probe
caattacccaaaaacacggacttct

SEQ ID NO: 2902 - DNA, 25 bp, Artificial Sequence
  Description of Artificial Sequence: Synthetic probe
tggtacggcccagacccagacacgg

SEQ ID NO: 2903 - DNA, 25 bp, Artificial Sequence
  Description of Artificial Sequence: Synthetic probe
acctcttcccactgctgattccgct

SEQ ID NO: 2904 - DNA, 25 bp, Artificial Sequence
  Description of Artificial Sequence: Synthetic probe
acacacacacccagatgtatgtgta

SEQ ID NO: 2905 - DNA, 25 bp, Artificial Sequence
  Description of Artificial Sequence: Synthetic probe
tggacggcccaccaccgcgacatgt

SEQ ID NO: 2906 - DNA, 25 bp, Artificial Sequence
  Description of Artificial Sequence: Synthetic probe
acgcacacacccacccacgcgtaaa

SEQ ID NO: 2907 - DNA, 25 bp, Artificial Sequence
  Description of Artificial Sequence: Synthetic probe
aaacggtcccacacgcgcagaaggg

SEQ ID NO: 2908 - DNA, 25 bp, Artificial Sequence
  Description of Artificial Sequence: Synthetic probe
gcggacacacccacgtgtaaacaca

SEQ ID NO: 2909 - DNA, 25 bp, Artificial Sequence
  Description of Artificial Sequence: Synthetic probe
gtgtcctcgcccactggaagtacga

SEQ ID NO: 2910 - DNA, 25 bp, Artificial Sequence
  Description of Artificial Sequence: Synthetic probe
cttccgacccacacataaggtgatt

SEQ ID NO: 2911 - DNA, 25 bp, Artificial Sequence
  Description of Artificial Sequence: Synthetic probe
agtggacacccacgcacagactgtc

SEQ ID NO: 2912 - DNA, 25 bp, Artificial Sequence
  Description of Artificial Sequence: Synthetic probe
ggacagaccgccagtagcaacagga

SEQ ID NO: 2913 - DNA, 25 bp, Artificial Sequence
  Description of Artificial Sequence: Synthetic probe
ggtctcctgccagccgcttcgcggt

SEQ ID NO: 2914 - DNA, 25 bp, Artificial Sequence
  Description of Artificial Sequence: Synthetic probe
catcgccgccaatagcgctttgatt

SEQ ID NO: 2915 - DNA, 25 bp, Artificial Sequence
  Description of Artificial Sequence: Synthetic probe
gcgccgccgccaggccgcccgccgg

SEQ ID NO: 2916 - DNA, 25 bp, Artificial Sequence
  Description of Artificial Sequence: Synthetic probe
acacacacggccaggacctgtcagt

SEQ ID NO: 2917 - DNA, 25 bp, Artificial Sequence
  Description of Artificial Sequence: Synthetic probe
gacagccagccagacacgtaggacc

SEQ ID NO: 2918 - DNA, 25 bp, Artificial Sequence
  Description of Artificial Sequence: Synthetic probe
ttggaccgccaacacacgtacctag

SEQ ID NO: 2919 - DNA, 25 bp, Artificial Sequence
  Description of Artificial Sequence: Synthetic probe
ttctcaacgccaccgccgactcggg

SEQ ID NO: 2920 - DNA, 25 bp, Artificial Sequence
  Description of Artificial Sequence: Synthetic probe
cccgccgccacgcagcaatagtacg

SEQ ID NO: 2921 - DNA, 25 bp, Artificial Sequence
  Description of Artificial Sequence: Synthetic probe
aacgtcctcgccacggcggaagaga

SEQ ID NO: 2922 - DNA, 25 bp, Artificial Sequence
  Description of Artificial Sequence: Synthetic probe
aggccacgccaggtagcgcccgttg

SEQ ID NO: 2923 - DNA, 25 bp, Artificial Sequence
  Description of Artificial Sequence: Synthetic probe
gtgtgtggcgccagttcctctcggt

SEQ ID NO: 2924 - DNA, 25 bp, Artificial Sequence
  Description of Artificial Sequence: Synthetic probe
ctgtgccgccagaactgtcgtatct

SEQ ID NO: 2925 - DNA, 25 bp, Artificial Sequence
  Description of Artificial Sequence: Synthetic probe
tgtctcgtccgccataactgtgtcg

SEQ ID NO: 2926 - DNA, 25 bp, Artificial Sequence
  Description of Artificial Sequence: Synthetic probe
atcgaaggccaccaccgaccggtaa

SEQ ID NO: 2927 - DNA, 25 bp, Artificial Sequence
  Description of Artificial Sequence: Synthetic probe
gtgacacccgccagcaccgatggta

SEQ ID NO: 2928 - DNA, 25 bp, Artificial Sequence
  Description of Artificial Sequence: Synthetic probe
aaagggccacacaccgcactgtaca

SEQ ID NO: 2929 - DNA, 25 bp, Artificial Sequence
  Description of Artificial Sequence: Synthetic probe
acactccggccacgacccacgtctg

SEQ ID NO: 2930 - DNA, 25 bp, Artificial Sequence
  Description of Artificial Sequence: Synthetic probe
gaggcgagacgccacgactccgacg

SEQ ID NO: 2931 - DNA, 25 bp, Artificial Sequence
  Description of Artificial Sequence: Synthetic probe
taccggaccgccaccgactcgaggt

SEQ ID NO: 2932 - DNA, 25 bp, Artificial Sequence
  Description of Artificial Sequence: Synthetic probe
gtgcaactcgccacaccacagggag

SEQ ID NO: 2933 - DNA, 25 bp, Artificial Sequence
  Description of Artificial Sequence: Synthetic probe
attgtccgccacacacgacggtcta

SEQ ID NO: 2934 - DNA, 25 bp, Artificial Sequence
  Description of Artificial Sequence: Synthetic probe
cagacgtcatcccatggtgtgtgtc

SEQ ID NO: 2935 - DNA, 25 bp, Artificial Sequence
  Description of Artificial Sequence: Synthetic probe
cgcggcgactcccaggtagaaaaat

SEQ ID NO: 2936 - DNA, 25 bp, Artificial Sequence
  Description of Artificial Sequence: Synthetic probe
tacccacggtcccagggtcggtgtc

SEQ ID NO: 2937 - DNA, 25 bp, Artificial Sequence
  Description of Artificial Sequence: Synthetic probe
gacttacacggtcccactcactcgt

SEQ ID NO: 2938 - skipped

SEQ ID NO: 2939 - DNA, 25 bp, Artificial Sequence
  Description of Artificial Sequence: Synthetic probe
ggacccgagtcccaagtcgtcgagg

SEQ ID NO: 2940 - DNA, 25 bp, Artificial Sequence
  Description of Artificial Sequence: Synthetic probe
cgtgcccgtcccactacgccttatg

SEQ ID NO: 2941 - DNA, 25 bp, Artificial Sequence
  Description of Artificial Sequence: Synthetic probe
cttacgccgtccagcagaaacgtca

SEQ ID NO: 2942 - DNA, 25 bp, Artificial Sequence
  Description of Artificial Sequence: Synthetic probe
gagacccgtctccacgtgccgagtc

SEQ ID NO: 2943 - DNA, 25 bp, Artificial Sequence
  Description of Artificial Sequence: Synthetic probe
gtctcgaccctccacacaccacggt

SEQ ID NO: 2944 - DNA, 25 bp, Artificial Sequence
  Description of Artificial Sequence: Synthetic probe
gtaggaggatccacgacacgagtcc

SEQ ID NO: 2945 - DNA, 25 bp, Artificial Sequence
  Description of Artificial Sequence: Synthetic probe
ccaccggtccacagtacgaatcgag

SEQ ID NO: 2946 - DNA, 25 bp, Artificial Sequence
  Description of Artificial Sequence: Synthetic probe
tttgtgtgtccatgtgaccgcccgt

SEQ ID NO: 2947 - DNA, 25 bp, Artificial Sequence
  Description of Artificial Sequence: Synthetic probe
actcctccgtccaaaagttgtaagg

SEQ ID NO: 2948 - DNA, 25 bp, Artificial Sequence
  Description of Artificial Sequence: Synthetic probe
cgttgtgtgtccattgtacttgtcc

SEQ ID NO: 2949 - DNA, 25 bp, Artificial Sequence
  Description of Artificial Sequence: Synthetic probe
tacgccaccgtccacagtgtcggtt

SEQ ID NO: 2950 - DNA, 25 bp, Artificial Sequence
  Description of Artificial Sequence: Synthetic probe
gtggtcaccgtccacctcatgggct

SEQ ID NO: 2951 - DNA, 25 bp, Artificial Sequence
  Description of Artificial Sequence: Synthetic probe
atcgtcgtccgtccatgaccatggt

SEQ ID NO: 2952 - DNA, 25 bp, Artificial Sequence
  Description of Artificial Sequence: Synthetic probe
tcggtgccgtccataccgcagacgt

SEQ ID NO: 2953 - DNA, 25 bp, Artificial Sequence
  Description of Artificial Sequence: Synthetic probe
agtactccgtcgtccatgtgataaa

SEQ ID NO: 2954 - DNA, 25 bp, Artificial Sequence
  Description of Artificial Sequence: Synthetic probe
acacacacacgtccatgtatatgtg

SEQ ID NO: 2955 - DNA, 25 bp, Artificial Sequence
  Description of Artificial Sequence: Synthetic probe
acgttccgacccttccgaaggtctt

SEQ ID NO: 2956 - DNA, 25 bp, Artificial Sequence
  Description of Artificial Sequence: Synthetic probe
gtccaccggtccacagtacgaatcg

SEQ ID NO: 2957 - DNA, 25 bp, Artificial Sequence
  Description of Artificial Sequence: Synthetic probe
ttagactcgtcccttcgccacggct

SEQ ID NO: 2958 - DNA, 25 bp, Artificial Sequence
  Description of Artificial Sequence: Synthetic probe
accacgcaccctgggagggacgtct

SEQ ID NO: 2959 - DNA, 25 bp, Artificial Sequence
  Description of Artificial Sequence: Synthetic probe
gacaccgactccctgtcagtactga

SEQ ID NO: 2960 - DNA, 25 bp, Artificial Sequence
  Description of Artificial Sequence: Synthetic probe
cgtccggtccctcgttctgaactaa

SEQ ID NO: 2961 - DNA, 25 bp, Artificial Sequence
  Description of Artificial Sequence: Synthetic probe
accataggccttttcggtgtgcgtt

SEQ ID NO: 2962 - DNA, 25 bp, Artificial Sequence
  Description of Artificial Sequence: Synthetic probe
gctcaagcgcctgtgcgtgctctgc

SEQ ID NO: 2963 - DNA, 25 bp, Artificial Sequence
  Description of Artificial Sequence: Synthetic probe
tgaagggcctgtgtctgtgtctacg

SEQ ID NO: 2964 - DNA, 25 bp, Artificial Sequence
  Description of Artificial Sequence: Synthetic probe
agcccgtgcctgtcgcgttaccgta

SEQ ID NO: 2965 - DNA, 25 bp, Artificial Sequence
  Description of Artificial Sequence: Synthetic probe
gtgtgtggtgcctcttctaaaccta

SEQ ID NO: 2966 - DNA, 25 bp, Artificial Sequence
  Description of Artificial Sequence: Synthetic probe
gtggttaacgcctgtgttcgagtaa

SEQ ID NO: 2967 - DNA, 25 bp, Artificial Sequence
  Description of Artificial Sequence: Synthetic probe
cgaagggcctctcgacaccgacgta

SEQ ID NO: 2968 - DNA, 25 bp, Artificial Sequence
  Description of Artificial Sequence: Synthetic probe
cggacctcgcctcttgccgcaaagg

SEQ ID NO: 2969 - DNA, 25 bp, Artificial Sequence
  Description of Artificial Sequence: Synthetic probe
aactcgccgcctcgtaagtgtcact

SEQ ID NO: 2970 - DNA, 25 bp, Artificial Sequence
  Description of Artificial Sequence: Synthetic probe
atcagggcctacacgaactggtgca

SEQ ID NO: 2971 - DNA, 25 bp, Artificial Sequence
  Description of Artificial Sequence: Synthetic probe
cgacacacgaccctagtgaagtctc

SEQ ID NO: 2972 - DNA, 25 bp, Artificial Sequence
  Description of Artificial Sequence: Synthetic probe
agcaccgacgcctactatatcaggt

SEQ ID NO: 2973 - DNA, 25 bp, Artificial Sequence
  Description of Artificial Sequence: Synthetic probe
acgtcgtgtagagcctacccagggt

SEQ ID NO: 2974 - DNA, 25 bp, Artificial Sequence
  Description of Artificial Sequence: Synthetic probe
actcttcttcctggcctgtatgggt

SEQ ID NO: 2975 - DNA, 25 bp, Artificial Sequence
  Description of Artificial Sequence: Synthetic probe
tcccgtcctcctgtgtggaatcctg

SEQ ID NO: 2976 - DNA, 25 bp, Artificial Sequence
  Description of Artificial Sequence: Synthetic probe
cctctcctcctccgctgttctctgt

SEQ ID NO: 2977 - DNA, 25 bp, Artificial Sequence
  Description of Artificial Sequence: Synthetic probe
agtgaggttcctccgacgcataccg

SEQ ID NO: 2978 - DNA, 25 bp, Artificial Sequence
  Description of Artificial Sequence: Synthetic probe
ctgctgctcctcctcgtcaagtagg

SEQ ID NO: 2979 - DNA, 25 bp, Artificial Sequence
  Description of Artificial Sequence: Synthetic probe
acctccggtcctttaggttctaact

SEQ ID NO: 2980 - DNA, 25 bp, Artificial Sequence
  Description of Artificial Sequence: Synthetic probe
accgcaggtcctgtgtgtgcaactt

SEQ ID NO: 2981 - DNA, 25 bp, Artificial Sequence
  Description of Artificial Sequence: Synthetic probe
gacactccgcgtcctgaacgtctga

SEQ ID NO: 2982 - DNA, 25 bp, Artificial Sequence
  Description of Artificial Sequence: Synthetic probe
agacctactacgtcctgatctccgt

SEQ ID NO: 2983 - DNA, 25 bp, Artificial Sequence
  Description of Artificial Sequence: Synthetic probe
cagtgtgcgtcctcgtgtctgtgca

SEQ ID NO: 2984 - DNA, 25 bp, Artificial Sequence
  Description of Artificial Sequence: Synthetic probe
tccacacacgtcctagttaagaaag

SEQ ID NO: 2985 - DNA, 25 bp, Artificial Sequence
  Description of Artificial Sequence: Synthetic probe
gtgtacgcgaggtcctagctcaagt

SEQ ID NO: 2986 - DNA, 25 bp, Artificial Sequence
  Description of Artificial Sequence: Synthetic probe
agaattcacctcaccagattggaag

SEQ ID NO: 2987 - DNA, 25 bp, Artificial Sequence
  Description of Artificial Sequence: Synthetic probe
gtggtccaacccaagcagtaggagg

SEQ ID NO: 2988 - DNA, 25 bp, Artificial Sequence
  Description of Artificial Sequence: Synthetic probe
ctcacacaacccagccggtcaggtc

SEQ ID NO: 2989 - DNA, 25 bp, Artificial Sequence
  Description of Artificial Sequence: Synthetic probe
agggacacacccgactcaaggccga

SEQ ID NO: 2990 - DNA, 25 bp, Artificial Sequence
  Description of Artificial Sequence: Synthetic probe
accttccacccagtcgccggaccaa

SEQ ID NO: 2991 - DNA, 25 bp, Artificial Sequence
  Description of Artificial Sequence: Synthetic probe
aagcgacacacccactcctgtatag

SEQ ID NO: 2992 - DNA, 25 bp, Artificial Sequence
  Description of Artificial Sequence: Synthetic probe
gaacgaacgcacccacatatgtacg

SEQ ID NO: 2993 - DNA, 25 bp, Artificial Sequence
  Description of Artificial Sequence: Synthetic probe
agcgttcacacccacactactgtga

SEQ ID NO: 2994 - DNA, 25 bp, Artificial Sequence
  Description of Artificial Sequence: Synthetic probe
agtactcacacacccacgtctgtgg

SEQ ID NO: 2995 - DNA, 25 bp, Artificial Sequence
  Description of Artificial Sequence: Synthetic probe
aaagggacccatcgacgccactcaa

SEQ ID NO: 2996 - DNA, 25 bp, Artificial Sequence
  Description of Artificial Sequence: Synthetic probe
gcgtcgtcaccacccgattgagaag

SEQ ID NO: 2997 - DNA, 25 bp, Artificial Sequence
  Description of Artificial Sequence: Synthetic probe
gacccacggaccctggaggactgac

SEQ ID NO: 2998 - DNA, 25 bp, Artificial Sequence
  Description of Artificial Sequence: Synthetic probe
acgcgactcacgacccgtgcagtgg

SEQ ID NO: 2999 - DNA, 25 bp, Artificial Sequence
  Description of Artificial Sequence: Synthetic probe
ttgacccgacccaacgctgacatgg

SEQ ID NO: 3000 - DNA, 25 bp, Artificial Sequence
  Description of Artificial Sequence: Synthetic probe
gaagctgaaccaacgttacccaagg

SEQ ID NO: 3001 - DNA, 25 bp, Artificial Sequence
  Description of Artificial Sequence: Synthetic probe
cgatcaccgaccctcgttcagtaag

SEQ ID NO: 3002 - DNA, 25 bp, Artificial Sequence
  Description of Artificial Sequence: Synthetic probe
gcggccgaaccaaaactggaagcac

SEQ ID NO: 3003 - DNA, 25 bp, Artificial Sequence
  Description of Artificial Sequence: Synthetic probe
tcggcgaccaccaggcacatgtggt

SEQ ID NO: 3004 - DNA, 25 bp, Artificial Sequence
  Description of Artificial Sequence: Synthetic probe
tggtcacacaccaggacaatttggt

SEQ ID NO: 3005 - DNA, 25 bp, Artificial Sequence
  Description of Artificial Sequence: Synthetic probe
gtctgacccaccaccgacccatctc

SEQ ID NO: 3006 - DNA, 25 bp, Artificial Sequence
  Description of Artificial Sequence: Synthetic probe
cgttcgtccaccagttccttttatt

SEQ ID NO: 3007 - DNA, 25 bp, Artificial Sequence
  Description of Artificial Sequence: Synthetic probe
ggagagacgcaccaacgactacgac

SEQ ID NO: 3008 - DNA, 25 bp, Artificial Sequence
  Description of Artificial Sequence: Synthetic probe
cgaccacacaccaggacactttaaa

SEQ ID NO: 3009 - DNA, 25 bp, Artificial Sequence
  Description of Artificial Sequence: Synthetic probe
accgcgcacaccacgatttgagatg

SEQ ID NO: 3010 - DNA, 25 bp, Artificial Sequence
  Description of Artificial Sequence: Synthetic probe
agaacgtccaccacgtggtactcgc

SEQ ID NO: 3011 - DNA, 25 bp, Artificial Sequence
  Description of Artificial Sequence: Synthetic probe
gtgaagcgtcaccactgtccgttgg

SEQ ID NO: 3012 - DNA, 25 bp, Artificial Sequence
  Description of Artificial Sequence: Synthetic probe
gtacatacacgcaccacacatatac

SEQ ID NO: 3013 - DNA, 25 bp, Artificial Sequence
  Description of Artificial Sequence: Synthetic probe
tgtccacgcaccacgacgcccacgg

SEQ ID NO: 3014 - skipped

SEQ ID NO: 3015 - DNA, 25 bp, Artificial Sequence
  Description of Artificial Sequence: Synthetic probe
aggaccgacgaccatcatacggggt

SEQ ID NO: 3016 - DNA, 25 bp, Artificial Sequence
  Description of Artificial Sequence: Synthetic probe
ctaccgtccgtacccgcaacccagt

SEQ ID NO: 3017 - DNA, 25 bp, Artificial Sequence
  Description of Artificial Sequence: Synthetic probe
cgatgtgacgaccacgactgccctt

SEQ ID NO: 3018 - DNA, 25 bp, Artificial Sequence
  Description of Artificial Sequence: Synthetic probe
gtattcacacgaccaccctcgagag

SEQ ID NO: 3019 - DNA, 25 bp, Artificial Sequence
  Description of Artificial Sequence: Synthetic probe
agacgagggaccacacccacgagac

SEQ ID NO: 3020 - DNA, 25 bp, Artificial Sequence
  Description of Artificial Sequence: Synthetic probe
acggagccgaccacacgtcttttcg

SEQ ID NO: 3021 - DNA, 25 bp, Artificial Sequence
  Description of Artificial Sequence: Synthetic probe
agtaccaatacccaccgaccagggg

SEQ ID NO: 3022 - DNA, 25 bp, Artificial Sequence
  Description of Artificial Sequence: Synthetic probe
ttaagcacgaccacgatcccgaatg

SEQ ID NO: 3023 - DNA, 25 bp, Artificial Sequence
  Description of Artificial Sequence: Synthetic probe
ttgtagctgaccacgaccacccggt

SEQ ID NO: 3024 - DNA, 25 bp, Artificial Sequence
  Description of Artificial Sequence: Synthetic probe
atttccgaccacgaaggtcctcgca

SEQ ID NO: 3025 - DNA, 25 bp, Artificial Sequence
  Description of Artificial Sequence: Synthetic probe
tacatatatatacccacacgtacac

SEQ ID NO: 3026 - DNA, 25 bp, Artificial Sequence
  Description of Artificial Sequence: Synthetic probe
ggagtacttgtacccaccgacgaca

SEQ ID NO: 3027 - DNA, 25 bp, Artificial Sequence
  Description of Artificial Sequence: Synthetic probe
ctagctgctaccacggaggatcaac

SEQ ID NO: 3028 - DNA, 25 bp, Artificial Sequence
  Description of Artificial Sequence: Synthetic probe
ggtcgaacactaccaccactacagt

SEQ ID NO: 3029 - DNA, 25 bp, Artificial Sequence
  Description of Artificial Sequence: Synthetic probe
cgtgcgtgaacctgacctaagtgtc

SEQ ID NO: 3030 - skipped

SEQ ID NO: 3031 - DNA, 25 bp, Artificial Sequence
  Description of Artificial Sequence: Synthetic probe
ccgagaccacctgatcgcggaggcg

SEQ ID NO: 3032 - DNA, 25 bp, Artificial Sequence
  Description of Artificial Sequence: Synthetic probe
accacaacacctctgtattggaacg

SEQ ID NO: 3033 - DNA, 25 bp, Artificial Sequence
  Description of Artificial Sequence: Synthetic probe
agaccgccacctcttcagtttctag

SEQ ID NO: 3034 - DNA, 25 bp, Artificial Sequence
  Description of Artificial Sequence: Synthetic probe
ttacgtcctcacctcactaggtggc

SEQ ID NO: 3035 - DNA, 25 bp, Artificial Sequence
  Description of Artificial Sequence: Synthetic probe
accgtcgtcaacctcggtgtcgaga

SEQ ID NO: 3036 - DNA, 25 bp, Artificial Sequence
  Description of Artificial Sequence: Synthetic probe
tcttatgaacctcgctgtgtgtgtc

SEQ ID NO: 3037 - DNA, 25 bp, Artificial Sequence
  Description of Artificial Sequence: Synthetic probe
gggaggcacctctcgccgacgctga

SEQ ID NO: 3038 - DNA, 25 bp, Artificial Sequence
  Description of Artificial Sequence: Synthetic probe
gtccgacccgaccttgctttaaact

SEQ ID NO: 3039 - DNA, 25 bp, Artificial Sequence
  Description of Artificial Sequence: Synthetic probe
ctttatgaccttccggaacctgaag

SEQ ID NO: 3040 - DNA, 25 bp, Artificial Sequence
  Description of Artificial Sequence: Synthetic probe
atcgtgtgtcgaccttggctttaag

SEQ ID NO: 3041 - DNA, 25 bp, Artificial Sequence
  Description of Artificial Sequence: Synthetic probe
ccgacacggacctggagttctcagt

SEQ ID NO: 3042 - DNA, 25 bp, Artificial Sequence
  Description of Artificial Sequence: Synthetic probe
gtcgacgcaccgacctgtcaattct

SEQ ID NO: 3043 - DNA, 25 bp, Artificial Sequence
  Description of Artificial Sequence: Synthetic probe
atatttagacctcaaccggacggga

SEQ ID NO: 3044 - DNA, 25 bp, Artificial Sequence
  Description of Artificial Sequence: Synthetic probe
actttgtcgacctcgtcgccactga

SEQ ID NO: 3045 - DNA, 25 bp, Artificial Sequence
  Description of Artificial Sequence: Synthetic probe
taggtccacgacctgcccgagaagg

SEQ ID NO: 3046 - DNA, 25 bp, Artificial Sequence
  Description of Artificial Sequence: Synthetic probe
cgcacccacctaccgtaaggtataa

SEQ ID NO: 3047 - DNA, 25 bp, Artificial Sequence
  Description of Artificial Sequence: Synthetic probe
tttcgccgacctcccagggtttcac

SEQ ID NO: 3048 - DNA, 25 bp, Artificial Sequence
  Description of Artificial Sequence: Synthetic probe
tggggcacctatacctcgtcagcgg

SEQ ID NO: 3049 - DNA, 25 bp, Artificial Sequence
  Description of Artificial Sequence: Synthetic probe
accgctgctacctcttcggaaggag

SEQ ID NO: 3050 - DNA, 25 bp, Artificial Sequence
  Description of Artificial Sequence: Synthetic probe
gtgtcctacctacctttgaaaggtg

SEQ ID NO: 3051 - DNA, 25 bp, Artificial Sequence
  Description of Artificial Sequence: Synthetic probe
gtacctcacctacctcgttcgaaga

SEQ ID NO: 3052 - DNA, 25 bp, Artificial Sequence
  Description of Artificial Sequence: Synthetic probe
cgtcacccgccgcgtagggagtgtc

SEQ ID NO: 3053 - DNA, 25 bp, Artificial Sequence
  Description of Artificial Sequence: Synthetic probe
acgcccggccgcgccagcccgggct

SEQ ID NO: 3054 - DNA, 25 bp, Artificial Sequence
  Description of Artificial Sequence: Synthetic probe
ttgtactggtacctccgtcgtccga

SEQ ID NO: 3055 - DNA, 25 bp, Artificial Sequence
  Description of Artificial Sequence: Synthetic probe
agaatgcccggccgaccaacttggt

SEQ ID NO: 3056 - DNA, 25 bp, Artificial Sequence
  Description of Artificial Sequence: Synthetic probe
ctcacaccaccgcggtagtatcaag

SEQ ID NO: 3057 - DNA, 25 bp, Artificial Sequence
  Description of Artificial Sequence: Synthetic probe
gagtccttcccggatccaaggtcat

SEQ ID NO: 3058 - DNA, 25 bp, Artificial Sequence
  Description of Artificial Sequence: Synthetic probe
actaaaacccgggtccgtccctggg

SEQ ID NO: 3059 - DNA, 25 bp, Artificial Sequence
  Description of Artificial Sequence: Synthetic probe
cggtttcccggtcgccataaggtat

SEQ ID NO: 3060 - DNA, 25 bp, Artificial Sequence
  Description of Artificial Sequence: Synthetic probe
actcccgtcccggtagaaaggcacg

SEQ ID NO: 3061 - DNA, 25 bp, Artificial Sequence
  Description of Artificial Sequence: Synthetic probe
cgaaccgacccggaccgtctagacc

SEQ ID NO: 3062 - skipped

SEQ ID NO: 3063 - DNA, 25 bp, Artificial Sequence
  Description of Artificial Sequence: Synthetic probe
ccttggccggcacgtgtgtgacgtc

SEQ ID NO: 3064 - DNA, 25 bp, Artificial Sequence
  Description of Artificial Sequence: Synthetic probe
ttcgcgccgccgatctacatccctt

SEQ ID NO: 3065 - DNA, 25 bp, Artificial Sequence
  Description of Artificial Sequence: Synthetic probe
gccgcgcacgccgcggcgcctggcc

SEQ ID NO: 3066 - DNA, 25 bp, Artificial Sequence
  Description of Artificial Sequence: Synthetic probe
tgttcgccgccgcacatccggagga

SEQ ID NO: 3067 - DNA, 25 bp, Artificial Sequence
  Description of Artificial Sequence: Synthetic probe
attcctgccgccgcggaaatatacc

SEQ ID NO: 3068 - DNA, 25 bp, Artificial Sequence
  Description of Artificial Sequence: Synthetic probe
tggtcccgccgcaggtctaccaaga

SEQ ID NO: 3069 - DNA, 25 bp, Artificial Sequence
  Description of Artificial Sequence: Synthetic probe
gccgccggccgctgtgactcaagta

SEQ ID NO: 3070 - DNA, 25 bp, Artificial Sequence
  Description of Artificial Sequence: Synthetic probe
ccgcccgccggggcagcgccgccgc

SEQ ID NO: 3071 - DNA, 25 bp, Artificial Sequence
  Description of Artificial Sequence: Synthetic probe
ctccccgccggccagcgccgcccgc

SEQ ID NO: 3072 - DNA, 25 bp, Artificial Sequence
  Description of Artificial Sequence: Synthetic probe
tcctggtcccgaacatgtcaggacc

SEQ ID NO: 3073 - DNA, 25 bp, Artificial Sequence
  Description of Artificial Sequence: Synthetic probe
cactaccgtcccgatgcgagggaga

SEQ ID NO: 3074 - DNA, 25 bp, Artificial Sequence
  Description of Artificial Sequence: Synthetic probe
tcctggacccgactcaacatatgcc

SEQ ID NO: 3075 - DNA, 25 bp, Artificial Sequence
  Description of Artificial Sequence: Synthetic probe
acactgacacccgatggatgtagtc

SEQ ID NO: 3076 - DNA, 25 bp, Artificial Sequence
  Description of Artificial Sequence: Synthetic probe
agcccgacccgagacgattaataga

SEQ ID NO: 3077 - DNA, 25 bp, Artificial Sequence
  Description of Artificial Sequence: Synthetic probe
ctccgtgtcccgattaacagagaaa

SEQ ID NO: 3078 - DNA, 25 bp, Artificial Sequence
  Description of Artificial Sequence: Synthetic probe
gtgtcccgacccgaagcaacgtgca

SEQ ID NO: 3079 - DNA, 25 bp, Artificial Sequence
  Description of Artificial Sequence: Synthetic probe
gggtcagcccgagcgcgaactcgtc

SEQ ID NO: 3080 - DNA, 25 bp, Artificial Sequence
  Description of Artificial Sequence: Synthetic probe
atccgacgcccgacaagaggaatcg

SEQ ID NO: 3081 - DNA, 25 bp, Artificial Sequence
  Description of Artificial Sequence: Synthetic probe
ggggacacccgacaccgtaggcact

SEQ ID NO: 3082 - DNA, 25 bp, Artificial Sequence
  Description of Artificial Sequence: Synthetic probe
gaaaccgtcccgacttttaaactag

SEQ ID NO: 3083 - DNA, 25 bp, Artificial Sequence
  Description of Artificial Sequence: Synthetic probe
tgctccgacccgatctacttatagg

SEQ ID NO: 3084 - DNA, 25 bp, Artificial Sequence
  Description of Artificial Sequence: Synthetic probe
acctggacccgacctaggaatccga

SEQ ID NO: 3085 - DNA, 25 bp, Artificial Sequence
  Description of Artificial Sequence: Synthetic probe
ctggtgacccgagttctaagagaag

SEQ ID NO: 3086 - DNA, 25 bp, Artificial Sequence
  Description of Artificial Sequence: Synthetic probe
cggagtccgccgacaaaggtttcca

SEQ ID NO: 3087 - DNA, 25 bp, Artificial Sequence
  Description of Artificial Sequence: Synthetic probe
gacacacagcccgacacacgttttg

SEQ ID NO: 3088 - DNA, 25 bp, Artificial Sequence
  Description of Artificial Sequence: Synthetic probe
caccaccgccgaaggttcagaggtc

SEQ ID NO: 3089-3090 - skipped (2 entries)

SEQ ID NO: 3091 - DNA, 25 bp, Artificial Sequence
  Description of Artificial Sequence: Synthetic probe
cccacgacgccgacgagcaggtgaa

SEQ ID NO: 3092 - DNA, 25 bp, Artificial Sequence
  Description of Artificial Sequence: Synthetic probe
cttgctacgccgacaaccatgctgt

SEQ ID NO: 3093 - DNA, 25 bp, Artificial Sequence
  Description of Artificial Sequence: Synthetic probe
tttccacgccgagacacggttgagt

SEQ ID NO: 3094 - DNA, 25 bp, Artificial Sequence
  Description of Artificial Sequence: Synthetic probe
cagtaagagccgacgacacgcaaac

SEQ ID NO: 3095 - DNA, 25 bp, Artificial Sequence
  Description of Artificial Sequence: Synthetic probe
ataaacgttccggtggtttgttcca

SEQ ID NO: 3096 - DNA, 25 bp, Artificial Sequence
  Description of Artificial Sequence: Synthetic probe
cggaacagccgacgacgattcctgt

SEQ ID NO: 3097 - skipped

SEQ ID NO: 3098 - DNA, 25 bp, Artificial Sequence
  Description of Artificial Sequence: Synthetic probe
actatctgcgccgacgccatgagtc

SEQ ID NO: 3099 - DNA, 25 bp, Artificial Sequence
  Description of Artificial Sequence: Synthetic probe
gtcccttctccggtgctctatcagt

SEQ ID NO: 3100 - DNA, 25 bp, Artificial Sequence
  Description of Artificial Sequence: Synthetic probe
cccgcgatccggtgcctcgggtaaa

SEQ ID NO: 3101 - DNA, 25 bp, Artificial Sequence
  Description of Artificial Sequence: Synthetic probe
tcttcattccgacgcgggtacgttc

SEQ ID NO: 3102 - DNA, 25 bp, Artificial Sequence
  Description of Artificial Sequence: Synthetic probe
gttcactacgacgtccggaccagga

SEQ ID NO: 3103 - DNA, 25 bp, Artificial Sequence
  Description of Artificial Sequence: Synthetic probe
cgtcctcgctccgatcagtggaatt

SEQ ID NO: 3104 - DNA, 25 bp, Artificial Sequence
  Description of Artificial Sequence: Synthetic probe
ccaacgactccgaggttctatagga

SEQ ID NO: 3105 - DNA, 25 bp, Artificial Sequence
  Description of Artificial Sequence: Synthetic probe
attactcctccgataaagggtcctc

SEQ ID NO: 3106 - DNA, 25 bp, Artificial Sequence
  Description of Artificial Sequence: Synthetic probe
tccgctctcccgtcccttcgcagac

SEQ ID NO: 3107 - skipped

SEQ ID NO: 3108 - DNA, 25 bp, Artificial Sequence
  Description of Artificial Sequence: Synthetic probe
agacaccacccgtaccgatggggac

SEQ ID NO: 3109 - DNA, 25 bp, Artificial Sequence
  Description of Artificial Sequence: Synthetic probe
ctgactcacccgtgttttaccacag

SEQ ID NO: 3110 - DNA, 25 bp, Artificial Sequence
  Description of Artificial Sequence: Synthetic probe
cggtgttgccgttgtggttcgttct

SEQ ID NO: 3111 - DNA, 25 bp, Artificial Sequence
  Description of Artificial Sequence: Synthetic probe
atatctcgtcccgtctatctaggtc

SEQ ID NO: 3112 - DNA, 25 bp, Artificial Sequence
  Description of Artificial Sequence: Synthetic probe
gccggccgccgtcttaagtaggaca

SEQ ID NO: 3113 - DNA, 25 bp, Artificial Sequence
  Description of Artificial Sequence: Synthetic probe
accggccgccgtcttaagtaggaca

SEQ ID NO: 3114 - DNA, 25 bp, Artificial Sequence
  Description of Artificial Sequence: Synthetic probe
ccagccgccgtaagggtggtcctga

SEQ ID NO: 3115 - DNA, 25 bp, Artificial Sequence
  Description of Artificial Sequence: Synthetic probe
gacacaagacccgtaggggttccct

SEQ ID NO: 3116 - DNA, 25 bp, Artificial Sequence
  Description of Artificial Sequence: Synthetic probe
ggtccgtctcccgtatttccctgga

SEQ ID NO: 3117 - DNA, 25 bp, Artificial Sequence
  Description of Artificial Sequence: Synthetic probe
tagtgtgaatccgtgtttgtggttt

SEQ ID NO: 3118 - DNA, 25 bp, Artificial Sequence
  Description of Artificial Sequence: Synthetic probe
gtttccactccgtccacaacgtagt

SEQ ID NO: 3119 - skipped

SEQ ID NO: 3120 - DNA, 25 bp, Artificial Sequence
  Description of Artificial Sequence: Synthetic probe
cccgtcctccgtgtctataatagga

SEQ ID NO: 3121 - DNA, 25 bp, Artificial Sequence
  Description of Artificial Sequence: Synthetic probe
aggactctctccgttgagccaggtc

SEQ ID NO: 3122 - DNA, 25 bp, Artificial Sequence
  Description of Artificial Sequence: Synthetic probe
atggaactccgtcacaccggtggac

SEQ ID NO: 3123 - DNA, 25 bp, Artificial Sequence
  Description of Artificial Sequence: Synthetic probe
cttggtgtccgtggcactcaagaga

SEQ ID NO: 3124 - DNA, 25 bp, Artificial Sequence
  Description of Artificial Sequence: Synthetic probe
tgggcggtaccggggttggtgtgtg

SEQ ID NO: 3125 - DNA, 25 bp, Artificial Sequence
  Description of Artificial Sequence: Synthetic probe
ttgatggtccgtatgtttagtcgtc

SEQ ID NO: 3126 - DNA, 25 bp, Artificial Sequence
  Description of Artificial Sequence: Synthetic probe
ccagtacggtccgtgtgtgacgacg

SEQ ID NO: 3127 - DNA, 25 bp, Artificial Sequence
  Description of Artificial Sequence: Synthetic probe
gcgagtgtccgtccgtgtgcactcg

SEQ ID NO: 3128 - DNA, 25 bp, Artificial Sequence
  Description of Artificial Sequence: Synthetic probe
aggcagcaccggaccgcacctaagg

SEQ ID NO: 3129 - DNA, 25 bp, Artificial Sequence
  Description of Artificial Sequence: Synthetic probe
gcaaaacaccggtgtgggtgtcgtt

SEQ ID NO: 3130 - DNA, 25 bp, Artificial Sequence
  Description of Artificial Sequence: Synthetic probe
ctggaaaccgaaccgaacagtcccg

SEQ ID NO: 3131 - DNA, 25 bp, Artificial Sequence
  Description of Artificial Sequence: Synthetic probe
aattcacaccggcaaggcgagacag

SEQ ID NO: 3132 - DNA, 25 bp, Artificial Sequence
  Description of Artificial Sequence: Synthetic probe
gacccaccaccgacccatctctacg

SEQ ID NO: 3133 - DNA, 25 bp, Artificial Sequence
  Description of Artificial Sequence: Synthetic probe
cgacgacgtccaccgctgtgagtca

SEQ ID NO: 3134 - skipped

SEQ ID NO: 3135 - DNA, 25 bp, Artificial Sequence
  Description of Artificial Sequence: Synthetic probe
accacggcaccgatttctctttctt

SEQ ID NO: 3136 - DNA, 25 bp, Artificial Sequence
  Description of Artificial Sequence: Synthetic probe
agtcaggcaccgacctcatctctgt

SEQ ID NO: 3137 - DNA, 25 bp, Artificial Sequence
  Description of Artificial Sequence: Synthetic probe
ttttgaaccgaaccgcaagaactcc

SEQ ID NO: 3138 - DNA, 25 bp, Artificial Sequence
  Description of Artificial Sequence: Synthetic probe
tccgaccgaaccgacgacgcttagg

SEQ ID NO: 3139 - DNA, 25 bp, Artificial Sequence
  Description of Artificial Sequence: Synthetic probe
tgtccaccaccgataataataatcg

SEQ ID NO: 3140 - DNA, 25 bp, Artificial Sequence
  Description of Artificial Sequence: Synthetic probe
gtaccggacctaccgccagacgcgc

SEQ ID NO: 3141 - DNA, 25 bp, Artificial Sequence
  Description of Artificial Sequence: Synthetic probe
gtccgtcccaccgattctcggaagg

SEQ ID NO: 3142 - DNA, 25 bp, Artificial Sequence
  Description of Artificial Sequence: Synthetic probe
gcgccgacgtcaccgacaagcggtt

SEQ ID NO: 3143 - DNA, 25 bp, Artificial Sequence
  Description of Artificial Sequence: Synthetic probe
ctacaccgacgaccgaagtaagaca

SEQ ID NO: 3144 - DNA, 25 bp, Artificial Sequence
  Description of Artificial Sequence: Synthetic probe
ctccgccaccgaggttatactaggt

SEQ ID NO: 3145 - DNA, 25 bp, Artificial Sequence
  Description of Artificial Sequence: Synthetic probe
attgacgaaccgaccactacggtct

SEQ ID NO: 3146 - DNA, 25 bp, Artificial Sequence
  Description of Artificial Sequence: Synthetic probe
aggtaaacaccgacgcaacaggggt

SEQ ID NO: 3147 - DNA, 25 bp, Artificial Sequence
  Description of Artificial Sequence: Synthetic probe
agtgaacgcaccgacgacctacacg

SEQ ID NO: 3148 - DNA, 25 bp, Artificial Sequence
  Description of Artificial Sequence: Synthetic probe
atttgacaccgacgaccgattggat

SEQ ID NO: 3149 - DNA, 25 bp, Artificial Sequence
  Description of Artificial Sequence: Synthetic probe
cggtcaacaccgacgctccggtagt

SEQ ID NO: 3150 - DNA, 25 bp, Artificial Sequence
  Description of Artificial Sequence: Synthetic probe
tattttagaccgagtgtgtgtgttg

SEQ ID NO: 3151 - DNA, 25 bp, Artificial Sequence
  Description of Artificial Sequence: Synthetic probe
cgtttccaccgacgagagttgtcga

SEQ ID NO: 3152 - DNA, 25 bp, Artificial Sequence
  Description of Artificial Sequence: Synthetic probe
cggggttaccgtttgtgtcttcctt

SEQ ID NO: 3153 - DNA, 25 bp, Artificial Sequence
  Description of Artificial Sequence: Synthetic probe
agccgccaccgtttaccgccgagga

SEQ ID NO: 3154 - DNA, 25 bp, Artificial Sequence
  Description of Artificial Sequence: Synthetic probe
cccaggtaccgactcacgtaatatc

SEQ ID NO: 3155 - DNA, 25 bp, Artificial Sequence
  Description of Artificial Sequence: Synthetic probe
cagagccaccgtcacgtcggtatcg

SEQ ID NO: 3156 - DNA, 25 bp, Artificial Sequence
  Description of Artificial Sequence: Synthetic probe
accgacgagacaccgtggttgtaga

SEQ ID NO: 3157 - DNA, 25 bp, Artificial Sequence
  Description of Artificial Sequence: Synthetic probe
agatacgccaccgtgctccgacgga

SEQ ID NO: 3158 - DNA, 25 bp, Artificial Sequence
  Description of Artificial Sequence: Synthetic probe
gtaaccaccgaccgttctggaaact

SEQ ID NO: 3159 - DNA, 25 bp, Artificial Sequence
  Description of Artificial Sequence: Synthetic probe
accctcacgaccgtaaaggatcctg

SEQ ID NO: 3160 - skipped

SEQ ID NO: 3161 - DNA, 25 bp, Artificial Sequence
  Description of Artificial Sequence: Synthetic probe
cttcctggggtgtcggtttgacttt

SEQ ID NO: 3162 - DNA, 25 bp, Artificial Sequence
  Description of Artificial Sequence: Synthetic probe
caccactggggcaccaccgtcgcac

SEQ ID NO: 3163 - DNA, 25 bp, Artificial Sequence
  Description of Artificial Sequence: Synthetic probe
gtaagggtaggggaactccttcacc

SEQ ID NO: 3164 - DNA, 25 bp, Artificial Sequence
  Description of Artificial Sequence: Synthetic probe
tcgtagacgtagtcggggctgtact

SEQ ID NO: 3165 - DNA, 25 bp, Artificial Sequence
  Description of Artificial Sequence: Synthetic probe
ccggatgggccgacgacctttaatc

SEQ ID NO: 3166 - DNA, 25 bp, Artificial Sequence
  Description of Artificial Sequence: Synthetic probe
cggtgtgtcggggacgtctaacttc

SEQ ID NO: 3167 - DNA, 25 bp, Artificial Sequence
  Description of Artificial Sequence: Synthetic probe
cataaagggccacacaccgcactgt

SEQ ID NO: 3168 - skipped

SEQ ID NO: 3169 - DNA, 25 bp, Artificial Sequence
  Description of Artificial Sequence: Synthetic probe
tgagtgtgcgggcgtgggtgcgtcc

SEQ ID NO: 3170 - DNA, 25 bp, Artificial Sequence
  Description of Artificial Sequence: Synthetic probe
acgtggtgtgggaaggtaccatcca

SEQ ID NO: 3171 - DNA, 25 bp, Artificial Sequence
  Description of Artificial Sequence: Synthetic probe
ttgtgtgtgggaagtcttactgagt

SEQ ID NO: 3172 - DNA, 25 bp, Artificial Sequence
  Description of Artificial Sequence: Synthetic probe
ccactacggggagggattacttgtt

SEQ ID NO: 3173 - DNA, 25 bp, Artificial Sequence
  Description of Artificial Sequence: Synthetic probe
accgtgcagggtcataaatgcctgg

SEQ ID NO: 3174 - DNA, 25 bp, Artificial Sequence
  Description of Artificial Sequence: Synthetic probe
cccagagggagtatttcacgcacac

SEQ ID NO: 3175 - DNA, 25 bp, Artificial Sequence
  Description of Artificial Sequence: Synthetic probe
acgtgggacgggacacgccaaccta

SEQ ID NO: 3176 - DNA, 25 bp, Artificial Sequence
  Description of Artificial Sequence: Synthetic probe
attgcacgggacacaaaagacctgt

SEQ ID NO: 3177 - DNA, 25 bp, Artificial Sequence
  Description of Artificial Sequence: Synthetic probe
ctaaagtgggacgttgtgtaagtca

SEQ ID NO: 3178 - DNA, 25 bp, Artificial Sequence
  Description of Artificial Sequence: Synthetic probe
attttcgggacacacctacaccatt

SEQ ID NO: 3179 - DNA, 25 bp, Artificial Sequence
  Description of Artificial Sequence: Synthetic probe
tgtgtgattgggtgggtaagtgatt

SEQ ID NO: 3180 - DNA, 25 bp, Artificial Sequence
  Description of Artificial Sequence: Synthetic probe
gcctcggttgggtcggttcttcttc

SEQ ID NO: 3181 - DNA, 25 bp, Artificial Sequence
  Description of Artificial Sequence: Synthetic probe
ggtgtctttgggtgtgtcatcacag

SEQ ID NO: 3182 - DNA, 25 bp, Artificial Sequence
  Description of Artificial Sequence: Synthetic probe
acgtgcgtttgggattgtgcctcct

SEQ ID NO: 3183 - DNA, 25 bp, Artificial Sequence
  Description of Artificial Sequence: Synthetic probe
aggcagatggtggtgaaacttttct

SEQ ID NO: 3184 - DNA, 25 bp, Artificial Sequence
  Description of Artificial Sequence: Synthetic probe
gtcttctcttgggtggtggaccttc

SEQ ID NO: 3185 - DNA, 25 bp, Artificial Sequence
  Description of Artificial Sequence: Synthetic probe
cacccactgggtaaggtggtctcca

SEQ ID NO: 3186 - DNA, 25 bp, Artificial Sequence
  Description of Artificial Sequence: Synthetic probe
tggggtctgggtcattcagtcttag

SEQ ID NO: 3187 - DNA, 25 bp, Artificial Sequence
  Description of Artificial Sequence: Synthetic probe
ctaaggtgtgggttcggctatttct

SEQ ID NO: 3188 - skipped

SEQ ID NO: 3189 - DNA, 25 bp, Artificial Sequence
  Description of Artificial Sequence: Synthetic probe
cggttgtgtgggtctcacgttacct

SEQ ID NO: 3190 - DNA, 25 bp, Artificial Sequence
  Description of Artificial Sequence: Synthetic probe
cctacttgtggggtgtgtaatcccg

SEQ ID NO: 3191 - DNA, 25 bp, Artificial Sequence
  Description of Artificial Sequence: Synthetic probe
tgtgagtgtgttgcccgactattct

SEQ ID NO: 3192 - DNA, 25 bp, Artificial Sequence
  Description of Artificial Sequence: Synthetic probe
attttgtgggtcgtgcgttgtacca

SEQ ID NO: 3193 - DNA, 25 bp, Artificial Sequence
  Description of Artificial Sequence: Synthetic probe
attcgttgtgggcttttccgtcgcc

SEQ ID NO: 3194 - DNA, 25 bp, Artificial Sequence
  Description of Artificial Sequence: Synthetic probe
aagttcggtgggtatatttgacgca

SEQ ID NO: 3195 - skipped

SEQ ID NO: 3196 - DNA, 25 bp, Artificial Sequence
  Description of Artificial Sequence: Synthetic probe
atctggcgtgggtcgtatctctacc

SEQ ID NO: 3197 - DNA, 25 bp, Artificial Sequence
  Description of Artificial Sequence: Synthetic probe
gttcggtggtggctttcaagactcg

SEQ ID NO: 3198 - DNA, 25 bp, Artificial Sequence
  Description of Artificial Sequence: Synthetic probe
gtgtgcgttcgtggcctactcagcc

SEQ ID NO: 3199 - DNA, 25 bp, Artificial Sequence
  Description of Artificial Sequence: Synthetic probe
ctttctgtgggtcctatcctgctgt

SEQ ID NO: 3200 - DNA, 25 bp, Artificial Sequence
  Description of Artificial Sequence: Synthetic probe
cttgtgtgtggggactgaaaacaac

SEQ ID NO: 3201 - DNA, 25 bp, Artificial Sequence
  Description of Artificial Sequence: Synthetic probe
ccggtgtgtgggacgcaaagtcttc

SEQ ID NO: 3202 - DNA, 25 bp, Artificial Sequence
  Description of Artificial Sequence: Synthetic probe
atgtctgtgtgggtctgactgcatc

SEQ ID NO: 3203 - DNA, 25 bp, Artificial Sequence
  Description of Artificial Sequence: Synthetic probe
tgtggacgttggatcgatgatccct

SEQ ID NO: 3204 - DNA, 25 bp, Artificial Sequence
  Description of Artificial Sequence: Synthetic probe
agagtagtgtgtggccatcgagtcc

SEQ ID NO: 3205 - DNA, 25 bp, Artificial Sequence
  Description of Artificial Sequence: Synthetic probe
gtgttggtgtggatccctacgaaaa

SEQ ID NO: 3206 - DNA, 25 bp, Artificial Sequence
  Description of Artificial Sequence: Synthetic probe
ctcctttggatggtcggttgtccgt

SEQ ID NO: 3207 - DNA, 25 bp, Artificial Sequence
  Description of Artificial Sequence: Synthetic probe
acggtgtggtggaacccttcttcgg

SEQ ID NO: 3208 - DNA, 25 bp, Artificial Sequence
  Description of Artificial Sequence: Synthetic probe
atggtggtggaaatagtctacagtt

SEQ ID NO: 3209 - DNA, 25 bp, Artificial Sequence
  Description of Artificial Sequence: Synthetic probe
cgtgtgcgcgtggatgcattgcttg

SEQ ID NO: 3210 - DNA, 25 bp, Artificial Sequence
  Description of Artificial Sequence: Synthetic probe
atcgtgagtgtggatccaaggttcc

SEQ ID NO: 3211 - skipped

SEQ ID NO: 3212 - DNA, 25 bp, Artificial Sequence
  Description of Artificial Sequence: Synthetic probe
gggtgtggtggatcttcaacgatac

SEQ ID NO: 3213 - DNA, 25 bp, Artificial Sequence
  Description of Artificial Sequence: Synthetic probe
cgacagtggtggagtcccaacatgt

SEQ ID NO: 3214 - DNA, 25 bp, Artificial Sequence
  Description of Artificial Sequence: Synthetic probe
cgtcacgagtgtggagatcatacta

SEQ ID NO: 3215 - DNA, 25 bp, Artificial Sequence
  Description of Artificial Sequence: Synthetic probe
tttgtgtgtggacgttctaaatgac

SEQ ID NO: 3216 - DNA, 25 bp, Artificial Sequence
  Description of Artificial Sequence: Synthetic probe
cgacgacaccgtggaagaacaaggt

SEQ ID NO: 3217 - DNA, 25 bp, Artificial Sequence
  Description of Artificial Sequence: Synthetic probe
cgtggtggggttcgtgtcacctcat

SEQ ID NO: 3218 - DNA, 25 bp, Artificial Sequence
  Description of Artificial Sequence: Synthetic probe
ctcttggggttggtgcgtacctaac

SEQ ID NO: 3219 - DNA, 25 bp, Artificial Sequence
  Description of Artificial Sequence: Synthetic probe
acactattgggtggtggtaacctgg

SEQ ID NO: 3220 - DNA, 25 bp, Artificial Sequence
  Description of Artificial Sequence: Synthetic probe
tactcttggggtgcgtggtcttact

SEQ ID NO: 3221 - DNA, 25 bp, Artificial Sequence
  Description of Artificial Sequence: Synthetic probe
gacactattgggtggtggtaacctg

SEQ ID NO: 3222 - DNA, 25 bp, Artificial Sequence
  Description of Artificial Sequence: Synthetic probe
agtccggtgggtgatacgtcattta

SEQ ID NO: 3223 - DNA, 25 bp, Artificial Sequence
  Description of Artificial Sequence: Synthetic probe
acctgtgtgggttgtgtcttcctcc

SEQ ID NO: 3224 - DNA, 25 bp, Artificial Sequence
  Description of Artificial Sequence: Synthetic probe
ctcggaagggttcgtacttttattt

SEQ ID NO: 3225-3226 - skipped (2 entries)

SEQ ID NO: 3227 - DNA, 25 bp, Artificial Sequence
  Description of Artificial Sequence: Synthetic probe
cattggggtgtctgtgcagtcagtt

SEQ ID NO: 3228 - DNA, 25 bp, Artificial Sequence
  Description of Artificial Sequence: Synthetic probe
cacctaagggtgtggttgtacccgt

SEQ ID NO: 3229 - DNA, 25 bp, Artificial Sequence
  Description of Artificial Sequence: Synthetic probe
acacacacacgggtggtcacctctg

SEQ ID NO: 3230 - DNA, 25 bp, Artificial Sequence
  Description of Artificial Sequence: Synthetic probe
tttatcgtgggtgtgactttatttc

SEQ ID NO: 3231 - DNA, 25 bp, Artificial Sequence
  Description of Artificial Sequence: Synthetic probe
caatcacgggtgttggtgtctgaac

SEQ ID NO: 3232 - DNA, 25 bp, Artificial Sequence
  Description of Artificial Sequence: Synthetic probe
tccatgcgggtgtttgtaatgtccc

SEQ ID NO: 3233 - skipped

SEQ ID NO: 3234 - DNA, 25 bp, Artificial Sequence
  Description of Artificial Sequence: Synthetic probe
acgtgtctgcgggtggacaaaaccg

SEQ ID NO: 3235 - DNA, 25 bp, Artificial Sequence
  Description of Artificial Sequence: Synthetic probe
gtttatccgggtttgtgcattaccc

SEQ ID NO: 3236 - DNA, 25 bp, Artificial Sequence
  Description of Artificial Sequence: Synthetic probe
cctacctcgggttgtggtctttcta

SEQ ID NO: 3237 - DNA, 25 bp, Artificial Sequence
  Description of Artificial Sequence: Synthetic probe
attcggtgggtcatatatcagtaaa

SEQ ID NO: 3238 - DNA, 25 bp, Artificial Sequence
  Description of Artificial Sequence: Synthetic probe
tatccgtggggtcggtacctcgtga

SEQ ID NO: 3239 - DNA, 25 bp, Artificial Sequence
  Description of Artificial Sequence: Synthetic probe
ccagacacgggtctttcctctgagt

SEQ ID NO: 3240 - DNA, 25 bp, Artificial Sequence
  Description of Artificial Sequence: Synthetic probe
cttctggcggtattggtgcctcttc

SEQ ID NO: 3241 - DNA, 25 bp, Artificial Sequence
  Description of Artificial Sequence: Synthetic probe
gtctcggtacgtgggtaaatagacg

SEQ ID NO: 3242 - DNA, 25 bp, Artificial Sequence
  Description of Artificial Sequence: Synthetic probe
tgtgtgtggggtagtagaccactct

SEQ ID NO: 3243 - DNA, 25 bp, Artificial Sequence
  Description of Artificial Sequence: Synthetic probe
ccgacgaccgggtaacgacgtacta

SEQ ID NO: 3244 - DNA, 25 bp, Artificial Sequence
  Description of Artificial Sequence: Synthetic probe
aagtccgttggtgggtctttgtgta

SEQ ID NO: 3245 - DNA, 25 bp, Artificial Sequence
  Description of Artificial Sequence: Synthetic probe
tggtgtgttggtgcactagtagtta

SEQ ID NO: 3246 - DNA, 25 bp, Artificial Sequence
  Description of Artificial Sequence: Synthetic probe
aacatttggtggtggtgtaatcgaa

SEQ ID NO: 3247 - DNA, 25 bp, Artificial Sequence
  Description of Artificial Sequence: Synthetic probe
aactgtttggttggtcttgacacct

SEQ ID NO: 3248 - DNA, 25 bp, Artificial Sequence
  Description of Artificial Sequence: Synthetic probe
atacaccgttggtttgtgttggtcc

SEQ ID NO: 3249 - DNA, 25 bp, Artificial Sequence
  Description of Artificial Sequence: Synthetic probe
gttcttcgttggttttgtcagtcac

SEQ ID NO: 3250 - DNA, 25 bp, Artificial Sequence
  Description of Artificial Sequence: Synthetic probe
attcgtcgttggtgtgtgacccttt

SEQ ID NO: 3251 - DNA, 25 bp, Artificial Sequence
  Description of Artificial Sequence: Synthetic probe
cggcttatggtgtgtgacactgtgt

SEQ ID NO: 3252 - DNA, 25 bp, Artificial Sequence
  Description of Artificial Sequence: Synthetic probe
atgttttggtgtagtgttggcgatc

SEQ ID NO: 3253 - DNA, 25 bp, Artificial Sequence
  Description of Artificial Sequence: Synthetic probe
atcccactggttggtcggctcaaag

SEQ ID NO: 3254 - DNA, 25 bp, Artificial Sequence
  Description of Artificial Sequence: Synthetic probe
gttacttttggtcggttggaacgac

SEQ ID NO: 3255 - DNA, 25 bp, Artificial Sequence
  Description of Artificial Sequence: Synthetic probe
tttacggtgtggttggtgatgtctc

SEQ ID NO: 3256 - DNA, 25 bp, Artificial Sequence
  Description of Artificial Sequence: Synthetic probe
tgccggttggtcaggtgtttctcga

SEQ ID NO: 3257 - DNA, 25 bp, Artificial Sequence
  Description of Artificial Sequence: Synthetic probe
ttggtggtggtgtaatcgaatctat

SEQ ID NO: 3258 - DNA, 25 bp, Artificial Sequence
  Description of Artificial Sequence: Synthetic probe
cactgtgtctggtctgcgtccgaaa

SEQ ID NO: 3259 - DNA, 25 bp, Artificial Sequence
  Description of Artificial Sequence: Synthetic probe
ctacggaggtggtggtaattccttc

SEQ ID NO: 3260 - DNA, 25 bp, Artificial Sequence
  Description of Artificial Sequence: Synthetic probe
caacgttgtggtggtgctccttcaa

SEQ ID NO: 3261 - DNA, 25 bp, Artificial Sequence
  Description of Artificial Sequence: Synthetic probe
gtctggtggtggtgatataacatcc

SEQ ID NO: 3262 - DNA, 25 bp, Artificial Sequence
  Description of Artificial Sequence: Synthetic probe
acatgtctctggtctctggttgcaa

SEQ ID NO: 3263 - DNA, 25 bp, Artificial Sequence
  Description of Artificial Sequence: Synthetic probe
acaagagcgtggtttgagggaccca

SEQ ID NO: 3264 - DNA, 25 bp, Artificial Sequence
  Description of Artificial Sequence: Synthetic probe
gtgttgggtggtggtaccctcagac

SEQ ID NO: 3265 - DNA, 25 bp, Artificial Sequence
  Description of Artificial Sequence: Synthetic probe
gtgggtggtggttgtctactcatac

SEQ ID NO: 3266 - DNA, 25 bp, Artificial Sequence
  Description of Artificial Sequence: Synthetic probe
acagtcggtgtggtttcttccttat

SEQ ID NO: 3267 - DNA, 25 bp, Artificial Sequence
  Description of Artificial Sequence: Synthetic probe
atacggtgtgtggtccctttcatca

SEQ ID NO: 3268 - DNA, 25 bp, Artificial Sequence
  Description of Artificial Sequence: Synthetic probe
agtgggtgtggtctgtcaactccaa

SEQ ID NO: 3269 - DNA, 25 bp, Artificial Sequence
  Description of Artificial Sequence: Synthetic probe
aagactctgtggtgtgtcagaacca

SEQ ID NO: 3270 - DNA, 25 bp, Artificial Sequence
  Description of Artificial Sequence: Synthetic probe
tttcggtgtggtgatgccttctcct

SEQ ID NO: 3271 - DNA, 25 bp, Artificial Sequence
  Description of Artificial Sequence: Synthetic probe
ctcgccggtggtgttgagaccttac

SEQ ID NO: 3272 - DNA, 25 bp, Artificial Sequence
  Description of Artificial Sequence: Synthetic probe
gttggtggtggtggaacctctcaaa

SEQ ID NO: 3273 - DNA, 25 bp, Artificial Sequence
  Description of Artificial Sequence: Synthetic probe
gtccttatgtggtgtggtccctcca

SEQ ID NO: 3274 - DNA, 25 bp, Artificial Sequence
  Description of Artificial Sequence: Synthetic probe
tcgcttgtgtggttcctattaaaga

SEQ ID NO: 3275 - DNA, 25 bp, Artificial Sequence
  Description of Artificial Sequence: Synthetic probe
gttggagtgtggtccttcgaaacta

SEQ ID NO: 3276 - DNA, 25 bp, Artificial Sequence
  Description of Artificial Sequence: Synthetic probe
tcgtgcttgtggtggcgtctgttcc

SEQ ID NO: 3277 - DNA, 25 bp, Artificial Sequence
  Description of Artificial Sequence: Synthetic probe
ccttccgtggttgtgagtctttcta

SEQ ID NO: 3278 - DNA, 25 bp, Artificial Sequence
  Description of Artificial Sequence: Synthetic probe
ctccactgtggtgttggtagagcca

SEQ ID NO: 3279 - DNA, 25 bp, Artificial Sequence
  Description of Artificial Sequence: Synthetic probe
gtacgacctggtggtgtgacccaac

SEQ ID NO: 3280 - DNA, 25 bp, Artificial Sequence
  Description of Artificial Sequence: Synthetic probe
tagtatactgtagtggtggtcatcc

SEQ ID NO: 3281 - DNA, 25 bp, Artificial Sequence
  Description of Artificial Sequence: Synthetic probe
attctacgtgtggtgtaggagacac

SEQ ID NO: 3282 - DNA, 25 bp, Artificial Sequence
  Description of Artificial Sequence: Synthetic probe
atccgtcgtgtggtgtcgtctcaca

SEQ ID NO: 3283 - DNA, 25 bp, Artificial Sequence
  Description of Artificial Sequence: Synthetic probe
gtctctcaagtggtgtggcgcttca

SEQ ID NO: 3284 - DNA, 25 bp, Artificial Sequence
  Description of Artificial Sequence: Synthetic probe
gtctgtgacgcgtggttctatttct

SEQ ID NO: 3285 - DNA, 25 bp, Artificial Sequence
  Description of Artificial Sequence: Synthetic probe
ctgttctcgtggtggtaacctgacc

SEQ ID NO: 3286 - DNA, 25 bp, Artificial Sequence
  Description of Artificial Sequence: Synthetic probe
tgggtgtcgtggtaccctctctccg

SEQ ID NO: 3287 - DNA, 25 bp, Artificial Sequence
  Description of Artificial Sequence: Synthetic probe
aattacagtggtcggttcctactcc

SEQ ID NO: 3288 - DNA, 25 bp, Artificial Sequence
  Description of Artificial Sequence: Synthetic probe
gtgtcgtgttacgtggtcctagaag

SEQ ID NO: 3289 - DNA, 25 bp, Artificial Sequence
  Description of Artificial Sequence: Synthetic probe
aggagtggtggtcgtcactaccgca

SEQ ID NO: 3290 - DNA, 25 bp, Artificial Sequence
  Description of Artificial Sequence: Synthetic probe
gcaccacgactggtatacctgcaac

SEQ ID NO: 3291 - DNA, 25 bp, Artificial Sequence
  Description of Artificial Sequence: Synthetic probe
cgatgggtggtagcggtctgcgtct

SEQ ID NO: 3292 - DNA, 25 bp, Artificial Sequence
  Description of Artificial Sequence: Synthetic probe
ctaccgtcaagggagtgtgtgacta

SEQ ID NO: 3293 - DNA, 25 bp, Artificial Sequence
  Description of Artificial Sequence: Synthetic probe
gtggtcccagggcaccacgacgaca

SEQ ID NO: 3294 - DNA, 25 bp, Artificial Sequence
  Description of Artificial Sequence: Synthetic probe
agttatccagggtaccacctcaggg

SEQ ID NO: 3295 - DNA, 25 bp, Artificial Sequence
  Description of Artificial Sequence: Synthetic probe
ccacacgcagggaacgaaatcttct

SEQ ID NO: 3296 - DNA, 25 bp, Artificial Sequence
  Description of Artificial Sequence: Synthetic probe
cttcgaaaggccttcgtggaacatg

SEQ ID NO: 3297 - DNA, 25 bp, Artificial Sequence
  Description of Artificial Sequence: Synthetic probe
ttagccgaaggccaccacgaccgag

SEQ ID NO: 3298 - DNA, 25 bp, Artificial Sequence
  Description of Artificial Sequence: Synthetic probe
gcacacgtcgaaggcactacgtcaa

SEQ ID NO: 3299 - DNA, 25 bp, Artificial Sequence
  Description of Artificial Sequence: Synthetic probe
actcgtgcgtgaggggacacttcta

SEQ ID NO: 3300 - DNA, 25 bp, Artificial Sequence
  Description of Artificial Sequence: Synthetic probe
accgcaagagggtccgcactgcgca

SEQ ID NO: 3301 - skipped

SEQ ID NO: 3302 - DNA, 25 bp, Artificial Sequence
  Description of Artificial Sequence: Synthetic probe
tgtagaacccggccctccagaacaa

SEQ ID NO: 3303 - DNA, 25 bp, Artificial Sequence
  Description of Artificial Sequence: Synthetic probe
cccaagagggagaagtcgactcgta

SEQ ID NO: 3304 - DNA, 25 bp, Artificial Sequence
  Description of Artificial Sequence: Synthetic probe
tagacgcgccgaggcaccggctttc

SEQ ID NO: 3305 - DNA, 25 bp, Artificial Sequence
  Description of Artificial Sequence: Synthetic probe
acacccgcaggaggttctagaacgc

SEQ ID NO: 3306 - DNA, 25 bp, Artificial Sequence
  Description of Artificial Sequence: Synthetic probe
tacgactacggcaggatcttaggta

SEQ ID NO: 3307 - DNA, 25 bp, Artificial Sequence
  Description of Artificial Sequence: Synthetic probe
gcatgaacaggagacgacgactgtc

SEQ ID NO: 3308 - DNA, 25 bp, Artificial Sequence
  Description of Artificial Sequence: Synthetic probe
agtttccaggaccttgaacagtcac

SEQ ID NO: 3309 - DNA, 25 bp, Artificial Sequence
  Description of Artificial Sequence: Synthetic probe
ggacttgcaggaccgcttccattgc

SEQ ID NO: 3310 - DNA, 25 bp, Artificial Sequence
  Description of Artificial Sequence: Synthetic probe
ggtttgaaggacgttcacgaacgat

SEQ ID NO: 3311 - DNA, 25 bp, Artificial Sequence
  Description of Artificial Sequence: Synthetic probe
cctctctgaggattgtgttgtgtct

SEQ ID NO: 3312 - DNA, 25 bp, Artificial Sequence
  Description of Artificial Sequence: Synthetic probe
cagacacacgaggactttgttcgtg

SEQ ID NO: 3313 - DNA, 25 bp, Artificial Sequence
  Description of Artificial Sequence: Synthetic probe
tcgccgccgaggagttgtaccgtcg

SEQ ID NO: 3314 - DNA, 25 bp, Artificial Sequence
  Description of Artificial Sequence: Synthetic probe
tgtgtgtgtgtaggacgacacctga

SEQ ID NO: 3315 - DNA, 25 bp, Artificial Sequence
  Description of Artificial Sequence: Synthetic probe
ctttcactaggacagagccgtcgtc

SEQ ID NO: 3316 - DNA, 25 bp, Artificial Sequence
  Description of Artificial Sequence: Synthetic probe
gaaccacacaggttaaaacataagt

SEQ ID NO: 3317 - DNA, 25 bp, Artificial Sequence
  Description of Artificial Sequence: Synthetic probe
cacgaccgaaggtgctacatcaggt

SEQ ID NO: 3318 - DNA, 25 bp, Artificial Sequence
  Description of Artificial Sequence: Synthetic probe
gactccgacgacaggttacgactcg

SEQ ID NO: 3319 - DNA, 25 bp, Artificial Sequence
  Description of Artificial Sequence: Synthetic probe
agtactgtgcgaggtggtgattaaa

SEQ ID NO: 3320 - DNA, 25 bp, Artificial Sequence
  Description of Artificial Sequence: Synthetic probe
cctgacggaggttttgttgtgttcc

SEQ ID NO: 3321 - DNA, 25 bp, Artificial Sequence
  Description of Artificial Sequence: Synthetic probe
accgcaccaggtcgaggtgcaaccg

SEQ ID NO: 3322 - DNA, 25 bp, Artificial Sequence
  Description of Artificial Sequence: Synthetic probe
cataggtcgaggtttcgtgtgtgtc

SEQ ID NO: 3323 - DNA, 25 bp, Artificial Sequence
  Description of Artificial Sequence: Synthetic probe
tccgaccgacgaggtttgtccgacg

SEQ ID NO: 3324 - DNA, 25 bp, Artificial Sequence
  Description of Artificial Sequence: Synthetic probe
tccagttcgaggtggtgcgtctact

SEQ ID NO: 3325 - DNA, 25 bp, Artificial Sequence
  Description of Artificial Sequence: Synthetic probe
ctccgccaggtaagacgtattttat

SEQ ID NO: 3326 - DNA, 25 bp, Artificial Sequence
  Description of Artificial Sequence: Synthetic probe
gtcatctcagaggtccgagaccagt

SEQ ID NO: 3327 - DNA, 25 bp, Artificial Sequence
  Description of Artificial Sequence: Synthetic probe
cagaacttaggtttcgtgcgtgaga

SEQ ID NO: 3328 - DNA, 25 bp, Artificial Sequence
  Description of Artificial Sequence: Synthetic probe
gtcaacgacacgaggtactcccggt

SEQ ID NO: 3329 - DNA, 25 bp, Artificial Sequence
  Description of Artificial Sequence: Synthetic probe
acagaagttaggtgtggtgcctccc

SEQ ID NO: 3330 - DNA, 25 bp, Artificial Sequence
  Description of Artificial Sequence: Synthetic probe
ggtctagtgtagtaggttggttccc

SEQ ID NO: 3331 - DNA, 25 bp, Artificial Sequence
  Description of Artificial Sequence: Synthetic probe
tcgtgagtgtgtaggtgcacttacg

SEQ ID NO: 3332 - DNA, 25 bp, Artificial Sequence
  Description of Artificial Sequence: Synthetic probe
aagttgccgggtctgtccgtgtaca

SEQ ID NO: 3333 - skipped

SEQ ID NO: 3334 - DNA, 25 bp, Artificial Sequence
  Description of Artificial Sequence: Synthetic probe
accgaccgccgggaaggcctactta

SEQ ID NO: 3335 - DNA, 25 bp, Artificial Sequence
  Description of Artificial Sequence: Synthetic probe
tccggcccgggccacgcgccgccgc

SEQ ID NO: 3336 - DNA, 25 bp, Artificial Sequence
  Description of Artificial Sequence: Synthetic probe
accgccgccgggctggcatgtgtgg

SEQ ID NO: 3337 - DNA, 25 bp, Artificial Sequence
  Description of Artificial Sequence: Synthetic probe
ccgaaaccgggtctcgtgccaagac

SEQ ID NO: 3338 - DNA, 25 bp, Artificial Sequence
  Description of Artificial Sequence: Synthetic probe
agctgtggcgggtaaacctcccttt

SEQ ID NO: 3339 - DNA, 25 bp, Artificial Sequence
  Description of Artificial Sequence: Synthetic probe
tgaagaaccggcctccgtagcggcg

SEQ ID NO: 3340 - DNA, 25 bp, Artificial Sequence
  Description of Artificial Sequence: Synthetic probe
caccgctccgggatcctctggaggg

SEQ ID NO: 3341 - DNA, 25 bp, Artificial Sequence
  Description of Artificial Sequence: Synthetic probe
cttcgctccgggtacaacgacgaca

SEQ ID NO: 3342 - DNA, 25 bp, Artificial Sequence
  Description of Artificial Sequence: Synthetic probe
agaaggaccgggagcccaagttcgt

SEQ ID NO: 3343 - DNA, 25 bp, Artificial Sequence
  Description of Artificial Sequence: Synthetic probe
gcgcccgccggcagcgcgcgccgcg

SEQ ID NO: 3344 - DNA, 25 bp, Artificial Sequence
  Description of Artificial Sequence: Synthetic probe
ctctcgatgcggcgtgctatgtccg

SEQ ID NO: 3345 - skipped

SEQ ID NO: 3346 - DNA, 25 bp, Artificial Sequence
  Description of Artificial Sequence: Synthetic probe
tcgacatgccggaccgaaccgttcg

SEQ ID NO: 3347 - DNA, 25 bp, Artificial Sequence
  Description of Artificial Sequence: Synthetic probe
accctacgaccggaactgcctggtg

SEQ ID NO: 3348 - DNA, 25 bp, Artificial Sequence
  Description of Artificial Sequence: Synthetic probe
gtgctaccgccggaacccgtcggga

SEQ ID NO: 3349 - DNA, 25 bp, Artificial Sequence
  Description of Artificial Sequence: Synthetic probe
tctcacgcccggagtgtgtggtcta

SEQ ID NO: 3350 - DNA, 25 bp, Artificial Sequence
  Description of Artificial Sequence: Synthetic probe
acctgatcgcggaggcgtccggacc

SEQ ID NO: 3351 - DNA, 25 bp, Artificial Sequence
  Description of Artificial Sequence: Synthetic probe
ccgacgacaccggatgtgtggaccc

SEQ ID NO: 3352 - DNA, 25 bp, Artificial Sequence
  Description of Artificial Sequence: Synthetic probe
gacctcagaccggagagtctcggct

SEQ ID NO: 3353 - DNA, 25 bp, Artificial Sequence
  Description of Artificial Sequence: Synthetic probe
agaacgcaccggagaaccgcagcag

SEQ ID NO: 3354 - DNA, 25 bp, Artificial Sequence
  Description of Artificial Sequence: Synthetic probe
tttttcgcggacctgttcgacctcg

SEQ ID NO: 3355 - DNA, 25 bp, Artificial Sequence
  Description of Artificial Sequence: Synthetic probe
acactactgccggactcgggaacct

SEQ ID NO: 3356 - DNA, 25 bp, Artificial Sequence
  Description of Artificial Sequence: Synthetic probe
aggaccaccggacatgtcaagatcg

SEQ ID NO: 3357 - DNA, 25 bp, Artificial Sequence
  Description of Artificial Sequence: Synthetic probe
ccgaccaccggacgaagaacaacta

SEQ ID NO: 3358 - DNA, 25 bp, Artificial Sequence
  Description of Artificial Sequence: Synthetic probe
tcaaggttcgggtgtggacttctat

SEQ ID NO: 3359 - skipped

SEQ ID NO: 3360 - DNA, 25 bp, Artificial Sequence
  Description of Artificial Sequence: Synthetic probe
cctaatcgcggacgacgacctattt

SEQ ID NO: 3361 - DNA, 25 bp, Artificial Sequence
  Description of Artificial Sequence: Synthetic probe
cgttgtttcgggtgtagaaatgccc

SEQ ID NO: 3362 - DNA, 25 bp, Artificial Sequence
  Description of Artificial Sequence: Synthetic probe
acccattcgggtgtgtcgagaaatc

SEQ ID NO: 3363 - DNA, 25 bp, Artificial Sequence
  Description of Artificial Sequence: Synthetic probe
tcttgtcagtcggcacactcagagg

SEQ ID NO: 3364 - DNA, 25 bp, Artificial Sequence
  Description of Artificial Sequence: Synthetic probe
cttgtggtcgggatagacgtattac

SEQ ID NO: 3365 - DNA, 25 bp, Artificial Sequence
  Description of Artificial Sequence: Synthetic probe
acctgtggtcggaggcttacactcg

SEQ ID NO: 3366 - DNA, 25 bp, Artificial Sequence
  Description of Artificial Sequence: Synthetic probe
tttgtcttcggtggtaaagtctcgt

SEQ ID NO: 3367 - DNA, 25 bp, Artificial Sequence
  Description of Artificial Sequence: Synthetic probe
gccagagccggtttgaccttacctt

SEQ ID NO: 3368 - DNA, 25 bp, Artificial Sequence
  Description of Artificial Sequence: Synthetic probe
acacacggccggttccaccagtcca

SEQ ID NO: 3369 - DNA, 25 bp, Artificial Sequence
  Description of Artificial Sequence: Synthetic probe
actccacgccggtgtcctcttacac

SEQ ID NO: 3370 - DNA, 25 bp, Artificial Sequence
  Description of Artificial Sequence: Synthetic probe
gcaaccaccggtcctcgaagaacag

SEQ ID NO: 3371 - DNA, 25 bp, Artificial Sequence
  Description of Artificial Sequence: Synthetic probe
aatggccggtgtgtgaaccacggtc

SEQ ID NO: 3372 - DNA, 25 bp, Artificial Sequence
  Description of Artificial Sequence: Synthetic probe
ggttcccgcggtggtagttcgcgta

SEQ ID NO: 3373 - DNA, 25 bp, Artificial Sequence
  Description of Artificial Sequence: Synthetic probe
aaggaggtcggtcggttgagtgtca

SEQ ID NO: 3374 - DNA, 25 bp, Artificial Sequence
  Description of Artificial Sequence: Synthetic probe
cgacgacaagcggtccacgacgact

SEQ ID NO: 3375 - DNA, 25 bp, Artificial Sequence
  Description of Artificial Sequence: Synthetic probe
ccagtggcggtgtcggccacgctcc

SEQ ID NO: 3376 - DNA, 25 bp, Artificial Sequence
  Description of Artificial Sequence: Synthetic probe
cacaaacgcggtgtgtggacctttc

SEQ ID NO: 3377 - DNA, 25 bp, Artificial Sequence
  Description of Artificial Sequence: Synthetic probe
ctccgtcccggtacgaaccgaaggg

SEQ ID NO: 3378 - DNA, 25 bp, Artificial Sequence
  Description of Artificial Sequence: Synthetic probe
ccaacatcggttaaaagaattacat

SEQ ID NO: 3379 - DNA, 25 bp, Artificial Sequence
  Description of Artificial Sequence: Synthetic probe
ctgaccgaccggtactaccagtgat

SEQ ID NO: 3380 - DNA, 25 bp, Artificial Sequence
  Description of Artificial Sequence: Synthetic probe
agacgccaccggtaccacttgtaga

SEQ ID NO: 3381 - DNA, 25 bp, Artificial Sequence
  Description of Artificial Sequence: Synthetic probe
actggtttcggtgaacgtttctttg

SEQ ID NO: 3382 - DNA, 25 bp, Artificial Sequence
  Description of Artificial Sequence: Synthetic probe
attgacttcggttcagtgtttgtcc

SEQ ID NO: 3383 - DNA, 25 bp, Artificial Sequence
  Description of Artificial Sequence: Synthetic probe
gtacgtgagtgtgcggtagacacct

SEQ ID NO: 3384 - DNA, 25 bp, Artificial Sequence
  Description of Artificial Sequence: Synthetic probe
cgaacattcggtgtctgtggacgtc

SEQ ID NO: 3385 - DNA, 25 bp, Artificial Sequence
  Description of Artificial Sequence: Synthetic probe
ctaccggtgtcggtgaggtaaactc

SEQ ID NO: 3386 - DNA, 25 bp, Artificial Sequence
  Description of Artificial Sequence: Synthetic probe
atggtcggtcggttatcctacgtgt

SEQ ID NO: 3387 - DNA, 25 bp, Artificial Sequence
  Description of Artificial Sequence: Synthetic probe
tcaaaggacggagcagcccgcgtcg

SEQ ID NO: 3388 - DNA, 25 bp, Artificial Sequence
  Description of Artificial Sequence: Synthetic probe
ccactccgtcggtttaggtaccacg

SEQ ID NO: 3389 - DNA, 25 bp, Artificial Sequence
  Description of Artificial Sequence: Synthetic probe
attgagtgtcggtgagtagcccttg

SEQ ID NO: 3390 - DNA, 25 bp, Artificial Sequence
  Description of Artificial Sequence: Synthetic probe
aggacgaggacggggaggacgggga

SEQ ID NO: 3391 - DNA, 25 bp, Artificial Sequence
  Description of Artificial Sequence: Synthetic probe
tattatggtcggtagtgtgtgtttt

SEQ ID NO: 3392 - DNA, 25 bp, Artificial Sequence
  Description of Artificial Sequence: Synthetic probe
cacacccacggggtaaagaacagga

SEQ ID NO: 3393 - DNA, 25 bp, Artificial Sequence
  Description of Artificial Sequence: Synthetic probe
gtctcacacgcacggggtagaagtg

SEQ ID NO: 3394 - DNA, 25 bp, Artificial Sequence
  Description of Artificial Sequence: Synthetic probe
acgacttactgacgggacacactgt

SEQ ID NO: 3395 - DNA, 25 bp, Artificial Sequence
  Description of Artificial Sequence: Synthetic probe
acaccgaccacggaatgtttcgtgt

SEQ ID NO: 3396 - DNA, 25 bp, Artificial Sequence
  Description of Artificial Sequence: Synthetic probe
ctccgaccacggagaacagtcgacg

SEQ ID NO: 3397 - DNA, 25 bp, Artificial Sequence
  Description of Artificial Sequence: Synthetic probe
aggacccgacggactcgaaaggtca

SEQ ID NO: 3398 - DNA, 25 bp, Artificial Sequence
  Description of Artificial Sequence: Synthetic probe
ctcacctcacggacaatatttcttt

SEQ ID NO: 3399 - DNA, 25 bp, Artificial Sequence
  Description of Artificial Sequence: Synthetic probe
atgattcacggatgacgacacgacc

SEQ ID NO: 3400 - DNA, 25 bp, Artificial Sequence
  Description of Artificial Sequence: Synthetic probe
cttgtccacggaggcacctacacgt

SEQ ID NO: 3401 - DNA, 25 bp, Artificial Sequence
  Description of Artificial Sequence: Synthetic probe
acacacacggtacgggtctaacttc

SEQ ID NO: 3402 - DNA, 25 bp, Artificial Sequence
  Description of Artificial Sequence: Synthetic probe
attgcacacggacggctcaaccagc

SEQ ID NO: 3403 - DNA, 25 bp, Artificial Sequence
  Description of Artificial Sequence: Synthetic probe
agcccagacggaacgggctgacgtc

SEQ ID NO: 3404 - DNA, 25 bp, Artificial Sequence
  Description of Artificial Sequence: Synthetic probe
acacacacgtctacggcggtaaaga

SEQ ID NO: 3405 - DNA, 25 bp, Artificial Sequence
  Description of Artificial Sequence: Synthetic probe
acgacagtagctacggcacgacctg

SEQ ID NO: 3406 - DNA, 25 bp, Artificial Sequence
  Description of Artificial Sequence: Synthetic probe
aataggaacggtgtgtgttgacgcc

SEQ ID NO: 3407 - DNA, 25 bp, Artificial Sequence
  Description of Artificial Sequence: Synthetic probe
cacgaacgaacggtaagtcggttcc

SEQ ID NO: 3408 - DNA, 25 bp, Artificial Sequence
  Description of Artificial Sequence: Synthetic probe
attttcacggtgtgtctggattaca

SEQ ID NO: 3409 - DNA, 25 bp, Artificial Sequence
  Description of Artificial Sequence: Synthetic probe
tgtctacacacacggtaaccgggcg

SEQ ID NO: 3410 - DNA, 25 bp, Artificial Sequence
  Description of Artificial Sequence: Synthetic probe
acgtatcatacacggtggtggtcat

SEQ ID NO: 3411 - DNA, 25 bp, Artificial Sequence
  Description of Artificial Sequence: Synthetic probe
ccacactcacggttggacgtctcgg

SEQ ID NO: 3412 - DNA, 25 bp, Artificial Sequence
  Description of Artificial Sequence: Synthetic probe
ttccacggacggtgacagcgacatg

SEQ ID NO: 3413 - DNA, 25 bp, Artificial Sequence
  Description of Artificial Sequence: Synthetic probe
tcacacacacgacggtctcgttcgt

SEQ ID NO: 3414 - DNA, 25 bp, Artificial Sequence
  Description of Artificial Sequence: Synthetic probe
ctacccgaggcccgcgcctctttga

SEQ ID NO: 3415 - DNA, 25 bp, Artificial Sequence
  Description of Artificial Sequence: Synthetic probe
agcctctggcccaggtctcgggagt

SEQ ID NO: 3416 - DNA, 25 bp, Artificial Sequence
  Description of Artificial Sequence: Synthetic probe
ggacactatggccactactcgcggt

SEQ ID NO: 3417 - DNA, 25 bp, Artificial Sequence
  Description of Artificial Sequence: Synthetic probe
ccactgggcctacttcctaattgtc

SEQ ID NO: 3418 - DNA, 25 bp, Artificial Sequence
  Description of Artificial Sequence: Synthetic probe
tgtcccaggccaccgacgactgagg

SEQ ID NO: 3419 - skipped

SEQ ID NO: 3420 - DNA, 25 bp, Artificial Sequence
  Description of Artificial Sequence: Synthetic probe
ccgtccgggccgagtcacaaggcaa

SEQ ID NO: 3421 - DNA, 25 bp, Artificial Sequence
  Description of Artificial Sequence: Synthetic probe
aggcaaggccgtaccgccgaccgta

SEQ ID NO: 3422 - DNA, 25 bp, Artificial Sequence
  Description of Artificial Sequence: Synthetic probe
aaacgtccggcctcctgtcatcgag

SEQ ID NO: 3423 - DNA, 25 bp, Artificial Sequence
  Description of Artificial Sequence: Synthetic probe
gctagtctatggcagcaacaaggct

SEQ ID NO: 3424 - DNA, 25 bp, Artificial Sequence
  Description of Artificial Sequence: Synthetic probe
ctcgtgtgggcagatacatcgtttt

SEQ ID NO: 3425 - DNA, 25 bp, Artificial Sequence
  Description of Artificial Sequence: Synthetic probe
agtcggacgggcaccaccttcattc

SEQ ID NO: 3426 - DNA, 25 bp, Artificial Sequence
  Description of Artificial Sequence: Synthetic probe
agtccttcggcacgccgtccaggag

SEQ ID NO: 3427 - DNA, 25 bp, Artificial Sequence
  Description of Artificial Sequence: Synthetic probe
tcccgacctgccgatcccacgactg

SEQ ID NO: 3428 - DNA, 25 bp, Artificial Sequence
  Description of Artificial Sequence: Synthetic probe
ctgaacaggcacacagacaggcgcg

SEQ ID NO: 3429 - DNA, 25 bp, Artificial Sequence
  Description of Artificial Sequence: Synthetic probe
acagtcaccggcacaccgctgaagg

SEQ ID NO: 3430 - DNA, 25 bp, Artificial Sequence
  Description of Artificial Sequence: Synthetic probe
ctccaccggcacaacgactaggtgt

SEQ ID NO: 3431 - DNA, 25 bp, Artificial Sequence
  Description of Artificial Sequence: Synthetic probe
agacaccaggcacacaccgtcgtag

SEQ ID NO: 3432 - DNA, 25 bp, Artificial Sequence
  Description of Artificial Sequence: Synthetic probe
aaacagttgccggaaaggacggaga

SEQ ID NO: 3433 - DNA, 25 bp, Artificial Sequence
  Description of Artificial Sequence: Synthetic probe
ccacacaggcacgtactacgtacat

SEQ ID NO: 3434 - DNA, 25 bp, Artificial Sequence
  Description of Artificial Sequence: Synthetic probe
atttgttgccacaccgacgaagagt

SEQ ID NO: 3435 - DNA, 25 bp, Artificial Sequence
  Description of Artificial Sequence: Synthetic probe
agcggtcatgccgcccagcgccgcc

SEQ ID NO: 3436 - DNA, 25 bp, Artificial Sequence
  Description of Artificial Sequence: Synthetic probe
ggtcctacctgccttgtacctgaca

SEQ ID NO: 3437 - DNA, 25 bp, Artificial Sequence
  Description of Artificial Sequence: Synthetic probe
ctttgatgcccagattcgtgtgtgc

SEQ ID NO: 3438 - DNA, 25 bp, Artificial Sequence
  Description of Artificial Sequence: Synthetic probe
aacaggctgccgacgacgttgacgc

SEQ ID NO: 3439 - DNA, 25 bp, Artificial Sequence
  Description of Artificial Sequence: Synthetic probe
ccactcgctgccaggttacggaagt

SEQ ID NO: 3440 - DNA, 25 bp, Artificial Sequence
  Description of Artificial Sequence: Synthetic probe
agtgacactactgccggcaccgaca

SEQ ID NO: 3441 - DNA, 25 bp, Artificial Sequence
  Description of Artificial Sequence: Synthetic probe
cttgtgtgtgccttaatactccacc

SEQ ID NO: 3442 - DNA, 25 bp, Artificial Sequence
  Description of Artificial Sequence: Synthetic probe
cttccgctgcaccacaggttggtag

SEQ ID NO: 3443 - DNA, 25 bp, Artificial Sequence
  Description of Artificial Sequence: Synthetic probe
tcctgtcctgcaatggttcgggtca

SEQ ID NO: 3444 - DNA, 25 bp, Artificial Sequence
  Description of Artificial Sequence: Synthetic probe
actccagctgcaccagaggtcactg

SEQ ID NO: 3445 - DNA, 25 bp, Artificial Sequence
  Description of Artificial Sequence: Synthetic probe
acgtgtctcgactgcacctggaaaa

SEQ ID NO: 3446 - DNA, 25 bp, Artificial Sequence
  Description of Artificial Sequence: Synthetic probe
acagtaggttgcacgcaccgaccgt

SEQ ID NO: 3447 - DNA, 25 bp, Artificial Sequence
  Description of Artificial Sequence: Synthetic probe
cgtccacagtgcacccacaccggag

SEQ ID NO: 3448 - DNA, 25 bp, Artificial Sequence
  Description of Artificial Sequence: Synthetic probe
ccagcggtgcagactagactccagc

SEQ ID NO: 3449 - DNA, 25 bp, Artificial Sequence
  Description of Artificial Sequence: Synthetic probe
acgtgtgagtctgcacttgtgtgtc

SEQ ID NO: 3450 - DNA, 25 bp, Artificial Sequence
  Description of Artificial Sequence: Synthetic probe
acggtggtggctactctttttttcc

SEQ ID NO: 3451 - DNA, 25 bp, Artificial Sequence
  Description of Artificial Sequence: Synthetic probe
gacccgtgtgtgcacccgtatccgt

SEQ ID NO: 3452 - DNA, 25 bp, Artificial Sequence
  Description of Artificial Sequence: Synthetic probe
ctactcgcggtgcaaggacccgaac

SEQ ID NO: 3453 - DNA, 25 bp, Artificial Sequence
  Description of Artificial Sequence: Synthetic probe
tctacggtgtgtgcatagtgtgtat

SEQ ID NO: 3454 - DNA, 25 bp, Artificial Sequence
  Description of Artificial Sequence: Synthetic probe
acggtcggtgtgcacgagtccttcc

SEQ ID NO: 3455 - DNA, 25 bp, Artificial Sequence
  Description of Artificial Sequence: Synthetic probe
tcctaggtgtgcagtgggtctcact

SEQ ID NO: 3456 - DNA, 25 bp, Artificial Sequence
  Description of Artificial Sequence: Synthetic probe
tccacacacgtgcagagtcttgagt

SEQ ID NO: 3457 - DNA, 25 bp, Artificial Sequence
  Description of Artificial Sequence: Synthetic probe
tgtagcgtacgtgtgcagtggcact

SEQ ID NO: 3458 - DNA, 25 bp, Artificial Sequence
  Description of Artificial Sequence: Synthetic probe
gttcgtgtgtgtgcacaacagtacc

SEQ ID NO: 3459 - DNA, 25 bp, Artificial Sequence
  Description of Artificial Sequence: Synthetic probe
agtcactaaggcttcggaccgaggc

SEQ ID NO: 3460 - DNA, 25 bp, Artificial Sequence
  Description of Artificial Sequence: Synthetic probe
cttttggcttggtggtatgaatact

SEQ ID NO: 3461 - DNA, 25 bp, Artificial Sequence
  Description of Artificial Sequence: Synthetic probe
acacacgtaaggcttgtcccgacgg

SEQ ID NO: 3462 - DNA, 25 bp, Artificial Sequence
  Description of Artificial Sequence: Synthetic probe
gtatacggttggctgtgtttacctt

SEQ ID NO: 3463 - DNA, 25 bp, Artificial Sequence
  Description of Artificial Sequence: Synthetic probe
aatcgacgcggcttgggtcggttac

SEQ ID NO: 3464 - DNA, 25 bp, Artificial Sequence
  Description of Artificial Sequence: Synthetic probe
gtccgtgtgggctaaggacctcgca

SEQ ID NO: 3465 - DNA, 25 bp, Artificial Sequence
  Description of Artificial Sequence: Synthetic probe
ggcacgcacggctcacgacacgttt

SEQ ID NO: 3466 - DNA, 25 bp, Artificial Sequence
  Description of Artificial Sequence: Synthetic probe
accgtcacacggctctgactcggta

SEQ ID NO: 3467 - DNA, 25 bp, Artificial Sequence
  Description of Artificial Sequence: Synthetic probe
tgagggtgtgctcggttcacgtcat

SEQ ID NO: 3468 - DNA, 25 bp, Artificial Sequence
  Description of Artificial Sequence: Synthetic probe
tggtgtctgtgctccctccagggag

SEQ ID NO: 3469 - skipped

SEQ ID NO: 3470 - DNA, 25 bp, Artificial Sequence
  Description of Artificial Sequence: Synthetic probe
gagtaggtgtgtgctcaccaggtta

SEQ ID NO: 3471 - DNA, 25 bp, Artificial Sequence
  Description of Artificial Sequence: Synthetic probe
actgtagtgcgtgctgtagctccgc

SEQ ID NO: 3472 - DNA, 25 bp, Artificial Sequence
  Description of Artificial Sequence: Synthetic probe
gtcacttgtctgctcacctgcgtca

SEQ ID NO: 3473 - DNA, 25 bp, Artificial Sequence
  Description of Artificial Sequence: Synthetic probe
cccatcgtgcttgtggtggcgtctg

SEQ ID NO: 3474 - DNA, 25 bp, Artificial Sequence
  Description of Artificial Sequence: Synthetic probe
actagtgtgtgtgctcgtcccaaga

SEQ ID NO: 3475 - DNA, 25 bp, Artificial Sequence
  Description of Artificial Sequence: Synthetic probe
ccttcacgtgctgcgtggtggagaa

SEQ ID NO: 3476 - DNA, 25 bp, Artificial Sequence
  Description of Artificial Sequence: Synthetic probe
tcgtggtgcgtgctaccgacaaaga

SEQ ID NO: 3477 - DNA, 25 bp, Artificial Sequence
  Description of Artificial Sequence: Synthetic probe
cgagtggtcgtgctaccttgtgtaa

SEQ ID NO: 3478 - DNA, 25 bp, Artificial Sequence
  Description of Artificial Sequence: Synthetic probe
acgtgctcgtgtgctcaagtctccg

SEQ ID NO: 3479 - DNA, 25 bp, Artificial Sequence
  Description of Artificial Sequence: Synthetic probe
cgtctcgccagccgcatggtaggcg

SEQ ID NO: 3480 - DNA, 25 bp, Artificial Sequence
  Description of Artificial Sequence: Synthetic probe
gtcgtggtgcgtgctaccgacaaag

SEQ ID NO: 3481 - DNA, 25 bp, Artificial Sequence
  Description of Artificial Sequence: Synthetic probe
cggaagacgtgctacacgacacgaa

SEQ ID NO: 3482 - DNA, 25 bp, Artificial Sequence
  Description of Artificial Sequence: Synthetic probe
ctgacgtcgtgtgctactgtagttt

SEQ ID NO: 3483 - DNA, 25 bp, Artificial Sequence
  Description of Artificial Sequence: Synthetic probe
ggccgccagccggagttacttctac

SEQ ID NO: 3484 - DNA, 25 bp, Artificial Sequence
  Description of Artificial Sequence: Synthetic probe
cttccaacgccgaagaaggtcaaga

SEQ ID NO: 3485 - DNA, 25 bp, Artificial Sequence
  Description of Artificial Sequence: Synthetic probe
aaggcacgagcccacgaagccggtc

SEQ ID NO: 3486 - DNA, 25 bp, Artificial Sequence
  Description of Artificial Sequence: Synthetic probe
acaggtgacagcaggtgaaggaatc

SEQ ID NO: 3487 - DNA, 25 bp, Artificial Sequence
  Description of Artificial Sequence: Synthetic probe
gcgcggaccgagccgcccggccggg

SEQ ID NO: 3488 - DNA, 25 bp, Artificial Sequence
  Description of Artificial Sequence: Synthetic probe
ctcaaaagcagaagactaggccgaa

SEQ ID NO: 3489 - DNA, 25 bp, Artificial Sequence
  Description of Artificial Sequence: Synthetic probe
gacaccaccgagcaaccagaaacag

SEQ ID NO: 3490 - DNA, 25 bp, Artificial Sequence
  Description of Artificial Sequence: Synthetic probe
tttaggagagcaacacgtatcggtg

SEQ ID NO: 3491 - DNA, 25 bp, Artificial Sequence
  Description of Artificial Sequence: Synthetic probe
ccgaccacgagcatagatgttttta

SEQ ID NO: 3492 - DNA, 25 bp, Artificial Sequence
  Description of Artificial Sequence: Synthetic probe
gcacaaagtagcaccgacgacagac

SEQ ID NO: 3493 - DNA, 25 bp, Artificial Sequence
  Description of Artificial Sequence: Synthetic probe
gggcgctagtagcaccgacaccgag

SEQ ID NO: 3494 - DNA, 25 bp, Artificial Sequence
  Description of Artificial Sequence: Synthetic probe
agtgtgcgggcgtgggtgcgtccag

SEQ ID NO: 3495 - DNA, 25 bp, Artificial Sequence
  Description of Artificial Sequence: Synthetic probe
ccccgggcggatgcgatgcggcgag

SEQ ID NO: 3496 - DNA, 25 bp, Artificial Sequence
  Description of Artificial Sequence: Synthetic probe
acagcagcggcggagaacccaacct

SEQ ID NO: 3497 - DNA, 25 bp, Artificial Sequence
  Description of Artificial Sequence: Synthetic probe
cttgccggcgaaaccacgacctgag

SEQ ID NO: 3498 - skipped

SEQ ID NO: 3499 - DNA, 25 bp, Artificial Sequence
  Description of Artificial Sequence: Synthetic probe
agggtaatgcgaccgacctatattc

SEQ ID NO: 3500 - DNA, 25 bp, Artificial Sequence
  Description of Artificial Sequence: Synthetic probe
aggactacgggcgacctccagtctc

SEQ ID NO: 3501 - DNA, 25 bp, Artificial Sequence
  Description of Artificial Sequence: Synthetic probe
cttacggtatgcgcgccgccccggc

SEQ ID NO: 3502 - DNA, 25 bp, Artificial Sequence
  Description of Artificial Sequence: Synthetic probe
acttttgtgcggttcgtgtgtgacc

SEQ ID NO: 3503 - DNA, 25 bp, Artificial Sequence
  Description of Artificial Sequence: Synthetic probe
ctcgtgcatgcgtgcctggctgcag

SEQ ID NO: 3504 - DNA, 25 bp, Artificial Sequence
  Description of Artificial Sequence: Synthetic probe
tttggggcgtcgcatcaaagaccga

SEQ ID NO: 3505 - DNA, 25 bp, Artificial Sequence
  Description of Artificial Sequence: Synthetic probe
cttgtgagtgcgacatgagcctacc

SEQ ID NO: 3506 - DNA, 25 bp, Artificial Sequence
  Description of Artificial Sequence: Synthetic probe
gccgttgtgtgcgatggtatttccc

SEQ ID NO: 3507 - DNA, 25 bp, Artificial Sequence
  Description of Artificial Sequence: Synthetic probe
cttgttgtgcgttgacgttacgtgg

SEQ ID NO: 3508 - DNA, 25 bp, Artificial Sequence
  Description of Artificial Sequence: Synthetic probe
acgggtcctgcgtgtgtttgtactt

SEQ ID NO: 3509 - DNA, 25 bp, Artificial Sequence
  Description of Artificial Sequence: Synthetic probe
tgtctgggtgcgtgcgacctccgaa

SEQ ID NO: 3510 - DNA, 25 bp, Artificial Sequence
  Description of Artificial Sequence: Synthetic probe
actgtggcgtgcgactcgagacact

SEQ ID NO: 3511 - DNA, 25 bp, Artificial Sequence
  Description of Artificial Sequence: Synthetic probe
cacagcgtgtgcgtgccttatcata

SEQ ID NO: 3512 - DNA, 25 bp, Artificial Sequence
  Description of Artificial Sequence: Synthetic probe
ctgtttgtgcgtcagtccctcacct

SEQ ID NO: 3513 - DNA, 25 bp, Artificial Sequence
  Description of Artificial Sequence: Synthetic probe
ggcgttgcggcgtgtctaaatagta

SEQ ID NO: 3514 - DNA, 25 bp, Artificial Sequence
  Description of Artificial Sequence: Synthetic probe
ggctccacggcgtgtcgacagacgt

SEQ ID NO: 3515 - DNA, 25 bp, Artificial Sequence
  Description of Artificial Sequence: Synthetic probe
ggccgataagcgaggtcccatagat

SEQ ID NO: 3516 - DNA, 25 bp, Artificial Sequence
  Description of Artificial Sequence: Synthetic probe
ctcctggtgcgtgcatagagaactc

SEQ ID NO: 3517 - DNA, 25 bp, Artificial Sequence
  Description of Artificial Sequence: Synthetic probe
agtgcccgtgcgtgtgcctcctgac

SEQ ID NO: 3518 - DNA, 25 bp, Artificial Sequence
  Description of Artificial Sequence: Synthetic probe
cttcgggtgcgtgctgtactacttc

SEQ ID NO: 3519 - DNA, 25 bp, Artificial Sequence
  Description of Artificial Sequence: Synthetic probe
agacttgtgtgcgtgtcgaaaccga

SEQ ID NO: 3520 - DNA, 25 bp, Artificial Sequence
  Description of Artificial Sequence: Synthetic probe
actctttgtgcgtgtgtttcgacgc

SEQ ID NO: 3521 - DNA, 25 bp, Artificial Sequence
  Description of Artificial Sequence: Synthetic probe
cgtgccacagcgtgtgcgggacctc

SEQ ID NO: 3522 - skipped

SEQ ID NO: 3523 - DNA, 25 bp, Artificial Sequence
  Description of Artificial Sequence: Synthetic probe
cgcgtagacgagtgcgtgcgacgac

SEQ ID NO: 3524 - DNA, 25 bp, Artificial Sequence
  Description of Artificial Sequence: Synthetic probe
gtgtgcctgtgcgtactttaaacca

SEQ ID NO: 3525 - DNA, 25 bp, Artificial Sequence
  Description of Artificial Sequence: Synthetic probe
tcgtgccacagcgtgtgcgggacct

SEQ ID NO: 3526 - DNA, 25 bp, Artificial Sequence
  Description of Artificial Sequence: Synthetic probe
tgccgcacagcgcagccaggcgaga

SEQ ID NO: 3527 - DNA, 25 bp, Artificial Sequence
  Description of Artificial Sequence: Synthetic probe
aaactcatagcgtagtgtgtggagg

SEQ ID NO: 3528 - DNA, 25 bp, Artificial Sequence
  Description of Artificial Sequence: Synthetic probe
actgacccagcgacaccagttgtga

SEQ ID NO: 3529 - DNA, 25 bp, Artificial Sequence
  Description of Artificial Sequence: Synthetic probe
cgccgcgccgcacccagccctcgcc

SEQ ID NO: 3530 - skipped

SEQ ID NO: 3531 - DNA, 25 bp, Artificial Sequence
  Description of Artificial Sequence: Synthetic probe
acataagccgcacaccgaaggttca

SEQ ID NO: 3532 - DNA, 25 bp, Artificial Sequence
  Description of Artificial Sequence: Synthetic probe
ttggaccgcgccgaaaaccgtgttt

SEQ ID NO: 3533 - DNA, 25 bp, Artificial Sequence
  Description of Artificial Sequence: Synthetic probe
gcacccgccgccatgcgtacctgct

SEQ ID NO: 3534 - DNA, 25 bp, Artificial Sequence
  Description of Artificial Sequence: Synthetic probe
tgagtccgtccgcctcaaccggaag

SEQ ID NO: 3535 - DNA, 25 bp, Artificial Sequence
  Description of Artificial Sequence: Synthetic probe
gacccgcgccgcccggccgtccggt

SEQ ID NO: 3536 - DNA, 25 bp, Artificial Sequence
  Description of Artificial Sequence: Synthetic probe
ggccgcgccgccgtttctgagataa

SEQ ID NO: 3537 - DNA, 25 bp, Artificial Sequence
  Description of Artificial Sequence: Synthetic probe
agtcaccaccgccaagatcagtagt

SEQ ID NO: 3538 - DNA, 25 bp, Artificial Sequence
  Description of Artificial Sequence: Synthetic probe
cccactccgccgacgagagtataaa

SEQ ID NO: 3539 - DNA, 25 bp, Artificial Sequence
  Description of Artificial Sequence: Synthetic probe
gggccgccgccaatagtttagtgtc

SEQ ID NO: 3540 - DNA, 25 bp, Artificial Sequence
  Description of Artificial Sequence: Synthetic probe
cccgcccgccgcatggcgcgcctcc

SEQ ID NO: 3541 - DNA, 25 bp, Artificial Sequence
  Description of Artificial Sequence: Synthetic probe
cccgccgcgcccggccatcgcgtgg

SEQ ID NO: 3542 - DNA, 25 bp, Artificial Sequence
  Description of Artificial Sequence: Synthetic probe
atgcgcgccgcctaccaaaggtgaa

SEQ ID NO: 3543 - DNA, 25 bp, Artificial Sequence
  Description of Artificial Sequence: Synthetic probe
aaggacaccgccacaccgatggagt

SEQ ID NO: 3544 - DNA, 25 bp, Artificial Sequence
  Description of Artificial Sequence: Synthetic probe
cacgccgccgcaggcaatgcgaggt

SEQ ID NO: 3545 - DNA, 25 bp, Artificial Sequence
  Description of Artificial Sequence: Synthetic probe
gcgccagcgcgcccgctgcggccgc

SEQ ID NO: 3546 - DNA, 25 bp, Artificial Sequence
  Description of Artificial Sequence: Synthetic probe
atcttcgccgccgtccagacgagcg

SEQ ID NO: 3547 - DNA, 25 bp, Artificial Sequence
  Description of Artificial Sequence: Synthetic probe
tgcttaggcgccaccgacagacgcg

SEQ ID NO: 3548 - DNA, 25 bp, Artificial Sequence
  Description of Artificial Sequence: Synthetic probe
agtacgatggcgccgtgcgtgtacc

SEQ ID NO: 3549 - DNA, 25 bp, Artificial Sequence
  Description of Artificial Sequence: Synthetic probe
accacggaccgcaagacacttgtag

SEQ ID NO: 3550 - DNA, 25 bp, Artificial Sequence
  Description of Artificial Sequence: Synthetic probe
aagtgtgtgcgcatacctctgaact

SEQ ID NO: 3551 - DNA, 25 bp, Artificial Sequence
  Description of Artificial Sequence: Synthetic probe
ctcctcagtcgcaccacatcttttg

SEQ ID NO: 3552 - DNA, 25 bp, Artificial Sequence
  Description of Artificial Sequence: Synthetic probe
ttccgcgccgcagtccaccgccgac

SEQ ID NO: 3553 - DNA, 25 bp, Artificial Sequence
  Description of Artificial Sequence: Synthetic probe
cgtccctctcgcctatttcgtgttt

SEQ ID NO: 3554 - DNA, 25 bp, Artificial Sequence
  Description of Artificial Sequence: Synthetic probe
cgcgcggccgcacgccggccgggcg

SEQ ID NO: 3555 - DNA, 25 bp, Artificial Sequence
  Description of Artificial Sequence: Synthetic probe
aagtcccgtcgccttaaggccgagg

SEQ ID NO: 3556 - DNA, 25 bp, Artificial Sequence
  Description of Artificial Sequence: Synthetic probe
cgtgtccactcgcacacctagggta

SEQ ID NO: 3557 - DNA, 25 bp, Artificial Sequence
  Description of Artificial Sequence: Synthetic probe
gtggaccgccgctatcatctaccta

SEQ ID NO: 3558 - DNA, 25 bp, Artificial Sequence
  Description of Artificial Sequence: Synthetic probe
cgccggatcgcaacgacggacgaaa

SEQ ID NO: 3559 - DNA, 25 bp, Artificial Sequence
  Description of Artificial Sequence: Synthetic probe
ccgagacttcgcacacaccggtgta

SEQ ID NO: 3560 - DNA, 25 bp, Artificial Sequence
  Description of Artificial Sequence: Synthetic probe
ctctcggtccgcttcaggaacagtc

SEQ ID NO: 3561 - DNA, 25 bp, Artificial Sequence
  Description of Artificial Sequence: Synthetic probe
aggtccgccgctctcaccaagaggt

SEQ ID NO: 3562 - DNA, 25 bp, Artificial Sequence
  Description of Artificial Sequence: Synthetic probe
accactgccgctacttgccatgtaa

SEQ ID NO: 3563 - DNA, 25 bp, Artificial Sequence
  Description of Artificial Sequence: Synthetic probe
cgagtgtagcacgccggcacgggat

SEQ ID NO: 3564 - DNA, 25 bp, Artificial Sequence
  Description of Artificial Sequence: Synthetic probe
ttgccaccgcgactacaatttctag

SEQ ID NO: 3565 - DNA, 25 bp, Artificial Sequence
  Description of Artificial Sequence: Synthetic probe
gcatccacacgcactgtaacacgag

SEQ ID NO: 3566 - DNA, 25 bp, Artificial Sequence
  Description of Artificial Sequence: Synthetic probe
aaagagacacgccatgccgactagc

SEQ ID NO: 3567 - DNA, 25 bp, Artificial Sequence
  Description of Artificial Sequence: Synthetic probe
caccgccgacgcaccagttctacga

SEQ ID NO: 3568 - DNA, 25 bp, Artificial Sequence
  Description of Artificial Sequence: Synthetic probe
tatacccacacgctcacatacatat

SEQ ID NO: 3569 - DNA, 25 bp, Artificial Sequence
  Description of Artificial Sequence: Synthetic probe
cttcaacacgcaccacactaaaggt

SEQ ID NO: 3570 - DNA, 25 bp, Artificial Sequence
  Description of Artificial Sequence: Synthetic probe
tctgtcaccgtcgctttcgccgagg

SEQ ID NO: 3571 - DNA, 25 bp, Artificial Sequence
  Description of Artificial Sequence: Synthetic probe
acacacacacgtcgctcatggagga

SEQ ID NO: 3572 - DNA, 25 bp, Artificial Sequence
  Description of Artificial Sequence: Synthetic probe
ggtagtctctacacgcacgggttaa

SEQ ID NO: 3573 - DNA, 25 bp, Artificial Sequence
  Description of Artificial Sequence: Synthetic probe
cagggcacgcacacacagtccgaga

SEQ ID NO: 3574 - DNA, 25 bp, Artificial Sequence
  Description of Artificial Sequence: Synthetic probe
tttgtcaccgcgcacagtcttcagg

SEQ ID NO: 3575 - DNA, 25 bp, Artificial Sequence
  Description of Artificial Sequence: Synthetic probe
accgacctcacgcaaaagtggtcct

SEQ ID NO: 3576 - DNA, 25 bp, Artificial Sequence
  Description of Artificial Sequence: Synthetic probe
gtaatcgacacgacgccgaaccgac

SEQ ID NO: 3577 - DNA, 25 bp, Artificial Sequence
  Description of Artificial Sequence: Synthetic probe
gacgccgacgacacgcacggtgact

SEQ ID NO: 3578 - DNA, 25 bp, Artificial Sequence
  Description of Artificial Sequence: Synthetic probe
gtgggcgcacgcacaggaactccgc

SEQ ID NO: 3579 - DNA, 25 bp, Artificial Sequence
  Description of Artificial Sequence: Synthetic probe
tgtgccgccgcgactttatggagta

SEQ ID NO: 3580 - DNA, 25 bp, Artificial Sequence
  Description of Artificial Sequence: Synthetic probe
taccccgtcgcgcgccactcgactc

SEQ ID NO: 3581 - DNA, 25 bp, Artificial Sequence
  Description of Artificial Sequence: Synthetic probe
gccgccgccgcggaaaggttatacc

SEQ ID NO: 3582 - DNA, 25 bp, Artificial Sequence
  Description of Artificial Sequence: Synthetic probe
tattcaccacgcgtcctcgcaggag

SEQ ID NO: 3583 - DNA, 25 bp, Artificial Sequence
  Description of Artificial Sequence: Synthetic probe
tctaaaagcaagtaaaaccaagagt

SEQ ID NO: 3584 - DNA, 25 bp, Artificial Sequence
  Description of Artificial Sequence: Synthetic probe
gtccgactgtcacgcgtgcaacatc

SEQ ID NO: 3585 - skipped

SEQ ID NO: 3586 - DNA, 25 bp, Artificial Sequence
  Description of Artificial Sequence: Synthetic probe
gatcgacacacacgcgaacgacaca

SEQ ID NO: 3587 - DNA, 25 bp, Artificial Sequence
  Description of Artificial Sequence: Synthetic probe
caggaaaaatccaacccagagacgt

SEQ ID NO: 3588 - DNA, 25 bp, Artificial Sequence
  Description of Artificial Sequence: Synthetic probe
acacctcgaaaatcctgcaagactt

SEQ ID NO: 3589 - DNA, 25 bp, Artificial Sequence
  Description of Artificial Sequence: Synthetic probe
ctctccaaaagacaggccgacgttt

SEQ ID NO: 3590 - DNA, 25 bp, Artificial Sequence
  Description of Artificial Sequence: Synthetic probe
ttccgacgtcaaatgagaccgttac

SEQ ID NO: 3591 - DNA, 25 bp, Artificial Sequence
  Description of Artificial Sequence: Synthetic probe
gtaagtgccaaaaccaacctcgcta

SEQ ID NO: 3592 - DNA, 25 bp, Artificial Sequence
  Description of Artificial Sequence: Synthetic probe
agcgcaacaaaacacactcgagcac

SEQ ID NO: 3593 - DNA, 25 bp, Artificial Sequence
  Description of Artificial Sequence: Synthetic probe
gtcaagtcacaaaactagactgcgt

SEQ ID NO: 3594 - DNA, 25 bp, Artificial Sequence
  Description of Artificial Sequence: Synthetic probe
accgccgcaaaggggccgccgcgat

SEQ ID NO: 3595 - DNA, 25 bp, Artificial Sequence
  Description of Artificial Sequence: Synthetic probe
acgtcacccaaagaacaaaagtaac

SEQ ID NO: 3596 - DNA, 25 bp, Artificial Sequence
  Description of Artificial Sequence: Synthetic probe
ttacggctacaaagtccaaagactc

SEQ ID NO: 3597 - DNA, 25 bp, Artificial Sequence
  Description of Artificial Sequence: Synthetic probe
gttcagggaaaaccgaccaccgtcc

SEQ ID NO: 3598 - DNA, 25 bp, Artificial Sequence
  Description of Artificial Sequence: Synthetic probe
gttgaactgaaaagaacgagactcc

SEQ ID NO: 3599 - DNA, 25 bp, Artificial Sequence
  Description of Artificial Sequence: Synthetic probe
ctgtgtgtgaaatgtcatggcttct

SEQ ID NO: 3600 - DNA, 25 bp, Artificial Sequence
  Description of Artificial Sequence: Synthetic probe
ccgataagaaaaggtgtgtggttac

SEQ ID NO: 3601 - DNA, 25 bp, Artificial Sequence
  Description of Artificial Sequence: Synthetic probe
acctccgtgaaagacagggtccttc

SEQ ID NO: 3602 - DNA, 25 bp, Artificial Sequence
  Description of Artificial Sequence: Synthetic probe
gaaagggaaagtatacgatacactt

SEQ ID NO: 3603 - DNA, 25 bp, Artificial Sequence
  Description of Artificial Sequence: Synthetic probe
gtcgccgtccgaaaacatccaaaac

SEQ ID NO: 3604 - DNA, 25 bp, Artificial Sequence
  Description of Artificial Sequence: Synthetic probe
ccagccgaaagaaaggtacgttaca

SEQ ID NO: 3605 - DNA, 25 bp, Artificial Sequence
  Description of Artificial Sequence: Synthetic probe
cggtatcgacgaaaggcctctgagt

SEQ ID NO: 3606 - DNA, 25 bp, Artificial Sequence
  Description of Artificial Sequence: Synthetic probe
aaaaagaaaccgtctagcaaggtgt

SEQ ID NO: 3607 - DNA, 25 bp, Artificial Sequence
  Description of Artificial Sequence: Synthetic probe
acgccgccgaaactcacgctccggt

SEQ ID NO: 3608 - DNA, 25 bp, Artificial Sequence
  Description of Artificial Sequence: Synthetic probe
accacactcgaaacgggaggtcgtc

SEQ ID NO: 3609 - DNA, 25 bp, Artificial Sequence
  Description of Artificial Sequence: Synthetic probe
gtgtgtgtcttaaaaacatcagcat

SEQ ID NO: 3610 - DNA, 25 bp, Artificial Sequence
  Description of Artificial Sequence: Synthetic probe
gtcgtgtccctaaaccggttcagtt

SEQ ID NO: 3611 - DNA, 25 bp, Artificial Sequence
  Description of Artificial Sequence: Synthetic probe
tgtgtgtgtataaacattcgtcgac

SEQ ID NO: 3612 - DNA, 25 bp, Artificial Sequence
  Description of Artificial Sequence: Synthetic probe
acatcccaatcatcctgacgagaac

SEQ ID NO: 3613 - DNA, 25 bp, Artificial Sequence
  Description of Artificial Sequence: Synthetic probe
cacacacacaatctcgacaatcgta

SEQ ID NO: 3614 - DNA, 25 bp, Artificial Sequence
  Description of Artificial Sequence: Synthetic probe
ccttaggaattgtgtcgtgttcaac

SEQ ID NO: 3615 - DNA, 25 bp, Artificial Sequence
  Description of Artificial Sequence: Synthetic probe
aaagaagaatgtccgtctccggacc

SEQ ID NO: 3616 - DNA, 25 bp, Artificial Sequence
  Description of Artificial Sequence: Synthetic probe
agacgacaacgaatgggaaccgagg

SEQ ID NO: 3617 - DNA, 25 bp, Artificial Sequence
  Description of Artificial Sequence: Synthetic probe
ggaagaacgaatccatgaccgacgt

SEQ ID NO: 3618 - DNA, 25 bp, Artificial Sequence
  Description of Artificial Sequence: Synthetic probe
ccttcagaatagttgttgtggggcg

SEQ ID NO: 3619 - DNA, 25 bp, Artificial Sequence
  Description of Artificial Sequence: Synthetic probe
cgacaccgactaattataggtgggt

SEQ ID NO: 3620 - DNA, 25 bp, Artificial Sequence
  Description of Artificial Sequence: Synthetic probe
cttaccgtctaatgtgtgtgagatc

SEQ ID NO: 3621 - DNA, 25 bp, Artificial Sequence
  Description of Artificial Sequence: Synthetic probe
ctgagtccattcaacgttcctaatt

SEQ ID NO: 3622 - DNA, 25 bp, Artificial Sequence
  Description of Artificial Sequence: Synthetic probe
tggtggtgtaatcgaatctatacca

SEQ ID NO: 3623 - DNA, 25 bp, Artificial Sequence
  Description of Artificial Sequence: Synthetic probe
gccaacaaagggacgccaccgacac

SEQ ID NO: 3624 - DNA, 25 bp, Artificial Sequence
  Description of Artificial Sequence: Synthetic probe
ccagacaaagggtgtgtgaccgtaa

SEQ ID NO: 3625 - DNA, 25 bp, Artificial Sequence
  Description of Artificial Sequence: Synthetic probe
accgccaaaggtacaagtccaaaga

SEQ ID NO: 3626 - DNA, 25 bp, Artificial Sequence
  Description of Artificial Sequence: Synthetic probe
taccgccgcaaggttttccgtgggc

SEQ ID NO: 3627 - DNA, 25 bp, Artificial Sequence
  Description of Artificial Sequence: Synthetic probe
acatcccaaggaaccgtcagacgcg

SEQ ID NO: 3628 - DNA, 25 bp, Artificial Sequence
  Description of Artificial Sequence: Synthetic probe
cgtagacttcaaggttgtgttgtgg

SEQ ID NO: 3629 - DNA, 25 bp, Artificial Sequence
  Description of Artificial Sequence: Synthetic probe
agtcttgtcaaggagtgtgtgtttc

SEQ ID NO: 3630 - DNA, 25 bp, Artificial Sequence
  Description of Artificial Sequence: Synthetic probe
ggtgtccaaagcgtacatttaccgt

SEQ ID NO: 3631 - skipped

SEQ ID NO: 3632 - DNA, 25 bp, Artificial Sequence
  Description of Artificial Sequence: Synthetic probe
ccggtgacaagcgtgtgtggaccac

SEQ ID NO: 3633 - DNA, 25 bp, Artificial Sequence
  Description of Artificial Sequence: Synthetic probe
atacgaacgtaaagcgaaagaactc

SEQ ID NO: 3634 - DNA, 25 bp, Artificial Sequence
  Description of Artificial Sequence: Synthetic probe
agccaccgaaggtcccgaacggaag

SEQ ID NO: 3635 - DNA, 25 bp, Artificial Sequence
  Description of Artificial Sequence: Synthetic probe
agaaggagaaggtgactacaaagaa

SEQ ID NO: 3636 - DNA, 25 bp, Artificial Sequence
  Description of Artificial Sequence: Synthetic probe
tcggacccaagaccaaagtgaactc

SEQ ID NO: 3637 - DNA, 25 bp, Artificial Sequence
  Description of Artificial Sequence: Synthetic probe
gtcggacctcgaaggagaaataagt

SEQ ID NO: 3638 - skipped

SEQ ID NO: 3639 - DNA, 25 bp, Artificial Sequence
  Description of Artificial Sequence: Synthetic probe
atcacacacaagacggtttcgttca

SEQ ID NO: 3640 - DNA, 25 bp, Artificial Sequence
  Description of Artificial Sequence: Synthetic probe
gttgttcgcaagaccgacgacgagc

SEQ ID NO: 3641 - DNA, 25 bp, Artificial Sequence
  Description of Artificial Sequence: Synthetic probe
gtgtctgtgtgtaaggtatgtgtct

SEQ ID NO: 3642 - DNA, 25 bp, Artificial Sequence
  Description of Artificial Sequence: Synthetic probe
ctcggtaagtaaggtcgtccatctc

SEQ ID NO: 3643 - DNA, 25 bp, Artificial Sequence
  Description of Artificial Sequence: Synthetic probe
cgtcgctaataagaaacgtgcgtgt

SEQ ID NO: 3644 - DNA, 25 bp, Artificial Sequence
  Description of Artificial Sequence: Synthetic probe
gtcaaaaaagtgcttacgggttaag

SEQ ID NO: 3645 - DNA, 25 bp, Artificial Sequence
  Description of Artificial Sequence: Synthetic probe
acagaacgaaagttgatctgtagtc

SEQ ID NO: 3646 - DNA, 25 bp, Artificial Sequence
  Description of Artificial Sequence: Synthetic probe
atattcctaagaccagtaggggttt

SEQ ID NO: 3647 - DNA, 25 bp, Artificial Sequence
  Description of Artificial Sequence: Synthetic probe
acttgtgtcaagtggtggtggtatt

SEQ ID NO: 3648 - DNA, 25 bp, Artificial Sequence
  Description of Artificial Sequence: Synthetic probe
gacttccgcaagtgtggtgtcgtgc

SEQ ID NO: 3649 - DNA, 25 bp, Artificial Sequence
  Description of Artificial Sequence: Synthetic probe
gtaagtgtcacaagtgtgtggagtc

SEQ ID NO: 3650 - DNA, 25 bp, Artificial Sequence
  Description of Artificial Sequence: Synthetic probe
ccgtgtcggaagtgtgaaagctacc

SEQ ID NO: 3651 - DNA, 25 bp, Artificial Sequence
  Description of Artificial Sequence: Synthetic probe
gtatgaatcgaagttccctacgacc

SEQ ID NO: 3652 - DNA, 25 bp, Artificial Sequence
  Description of Artificial Sequence: Synthetic probe
agaaagaaagtagacgagaagcacg

SEQ ID NO: 3653 - DNA, 25 bp, Artificial Sequence
  Description of Artificial Sequence: Synthetic probe
gaacaccgacgaagtagcagtacct

SEQ ID NO: 3654 - DNA, 25 bp, Artificial Sequence
  Description of Artificial Sequence: Synthetic probe
gtagtgtggtgaagtaacgagaacc

SEQ ID NO: 3655 - DNA, 25 bp, Artificial Sequence
  Description of Artificial Sequence: Synthetic probe
acctcagtccaaaagtgtgtgtcgt

SEQ ID NO: 3656 - DNA, 25 bp, Artificial Sequence
  Description of Artificial Sequence: Synthetic probe
gtccgacgcgccaaagggctttggt

SEQ ID NO: 3657 - DNA, 25 bp, Artificial Sequence
  Description of Artificial Sequence: Synthetic probe
caaatccaaagcgtgtgtgagccgg

SEQ ID NO: 3658 - DNA, 25 bp, Artificial Sequence
  Description of Artificial Sequence: Synthetic probe
gtctctccgaccaaacgcctgttaa

SEQ ID NO: 3659 - skipped

SEQ ID NO: 3660 - DNA, 25 bp, Artificial Sequence
  Description of Artificial Sequence: Synthetic probe
acctcgacccaagaactttgtgacg

SEQ ID NO: 3661 - DNA, 25 bp, Artificial Sequence
  Description of Artificial Sequence: Synthetic probe
cttaataccaacctgaagcacgaac

SEQ ID NO: 3662 - DNA, 25 bp, Artificial Sequence
  Description of Artificial Sequence: Synthetic probe
acgtccgtctccaacatattgtccc

SEQ ID NO: 3663 - DNA, 25 bp, Artificial Sequence
  Description of Artificial Sequence: Synthetic probe
agtgatcggcaagtttttccctgtg

SEQ ID NO: 3664 - DNA, 25 bp, Artificial Sequence
  Description of Artificial Sequence: Synthetic probe
ctcgagggcaaacctgcggtccctt

SEQ ID NO: 3665 - DNA, 25 bp, Artificial Sequence
  Description of Artificial Sequence: Synthetic probe
cgtccgtcacgcaacgcagatattt

SEQ ID NO: 3666 - DNA, 25 bp, Artificial Sequence
  Description of Artificial Sequence: Synthetic probe
cgccgtcacgcaaacaactaaagta

SEQ ID NO: 3667 - DNA, 25 bp, Artificial Sequence
  Description of Artificial Sequence: Synthetic probe
cgcgaccttcaacagacacgggtgt

SEQ ID NO: 3668 - DNA, 25 bp, Artificial Sequence
  Description of Artificial Sequence: Synthetic probe
acgcacgcactcaaggggtctcata

SEQ ID NO: 3669 - DNA, 25 bp, Artificial Sequence
  Description of Artificial Sequence: Synthetic probe
ctccgcctcaacacgagtcagtggg

SEQ ID NO: 3670 - DNA, 25 bp, Artificial Sequence
  Description of Artificial Sequence: Synthetic probe
tgaaacgtgtcaaaccgggtcgccc

SEQ ID NO: 3671 - DNA, 25 bp, Artificial Sequence
  Description of Artificial Sequence: Synthetic probe
ccggggtcaatatgtgtgtgtgtca

SEQ ID NO: 3672 - DNA, 25 bp, Artificial Sequence
  Description of Artificial Sequence: Synthetic probe
tcacttgtgtcaagtggtggtggta

SEQ ID NO: 3673 - DNA, 25 bp, Artificial Sequence
  Description of Artificial Sequence: Synthetic probe
cgtcatcccatggtgtgtgtcgtac

SEQ ID NO: 3674 - DNA, 25 bp, Artificial Sequence
  Description of Artificial Sequence: Synthetic probe
gttcgccgccatgaactaaagcatg

SEQ ID NO: 3675 - DNA, 25 bp, Artificial Sequence
  Description of Artificial Sequence: Synthetic probe
gtccgacgcaccattgacgtttgta

SEQ ID NO: 3676 - DNA, 25 bp, Artificial Sequence
  Description of Artificial Sequence: Synthetic probe
agaccgttccatcccaagcaagact

SEQ ID NO: 3677 - DNA, 25 bp, Artificial Sequence
  Description of Artificial Sequence: Synthetic probe
acaccgacccatcgagactaagagg

SEQ ID NO: 3678 - DNA, 25 bp, Artificial Sequence
  Description of Artificial Sequence: Synthetic probe
gcacgccgccatcgacaagaagagg

SEQ ID NO: 3679 - DNA, 25 bp, Artificial Sequence
  Description of Artificial Sequence: Synthetic probe
cgagccgacgcatcaggagcatcat

SEQ ID NO: 3680 - DNA, 25 bp, Artificial Sequence
  Description of Artificial Sequence: Synthetic probe
acagtcactccacacaccatacata

SEQ ID NO: 3681 - DNA, 25 bp, Artificial Sequence
  Description of Artificial Sequence: Synthetic probe
taactttgcatgtgtgtgggtccca

SEQ ID NO: 3682 - DNA, 25 bp, Artificial Sequence
  Description of Artificial Sequence: Synthetic probe
tccgtcctccatacacttctttttg

SEQ ID NO: 3683 - DNA, 25 bp, Artificial Sequence
  Description of Artificial Sequence: Synthetic probe
ctcaactcgcatctcatggcctggt

SEQ ID NO: 3684 - DNA, 25 bp, Artificial Sequence
  Description of Artificial Sequence: Synthetic probe
ccatgagcataacgcggagctaccg

SEQ ID NO: 3685 - DNA, 25 bp, Artificial Sequence
  Description of Artificial Sequence: Synthetic probe
ggtcctcgtccatacaaagtttcgg

SEQ ID NO: 3686 - DNA, 25 bp, Artificial Sequence
  Description of Artificial Sequence: Synthetic probe
agacattgaactttgcctcgcagga

SEQ ID NO: 3687 - DNA, 25 bp, Artificial Sequence
  Description of Artificial Sequence: Synthetic probe
cggtgtgtgcatagtgtgtatacag

SEQ ID NO: 3688 - DNA, 25 bp, Artificial Sequence
  Description of Artificial Sequence: Synthetic probe
agtgtgtgcgcatacctctgaacta

SEQ ID NO: 3689 - DNA, 25 bp, Artificial Sequence
  Description of Artificial Sequence: Synthetic probe
cggccatcatcagcacccaccggtg

SEQ ID NO: 3690 - DNA, 25 bp, Artificial Sequence
  Description of Artificial Sequence: Synthetic probe
ggagtgtgtatcattccgtgtgtga

SEQ ID NO: 3691 - skipped

SEQ ID NO: 3692 - DNA, 25 bp, Artificial Sequence
  Description of Artificial Sequence: Synthetic probe
atccgtcctcatctccctatggaaa

SEQ ID NO: 3693 - DNA, 25 bp, Artificial Sequence
  Description of Artificial Sequence: Synthetic probe
tgggtcaacaagtgtgtgtgagtaa

SEQ ID NO: 3694 - DNA, 25 bp, Artificial Sequence
  Description of Artificial Sequence: Synthetic probe
cttaggacacaaatacagacgttgg

SEQ ID NO: 3695 - DNA, 25 bp, Artificial Sequence
  Description of Artificial Sequence: Synthetic probe
gtcgcccacacaacacgtcaaaggt

SEQ ID NO: 3696 - DNA, 25 bp, Artificial Sequence
  Description of Artificial Sequence: Synthetic probe
acaaaggacaagagggacgaacctc

SEQ ID NO: 3697 - DNA, 25 bp, Artificial Sequence
  Description of Artificial Sequence: Synthetic probe
tgactaccgacgacaatcctcacgc

SEQ ID NO: 3698 - DNA, 25 bp, Artificial Sequence
  Description of Artificial Sequence: Synthetic probe
tgctacgccgacaaccatgctgtgt

SEQ ID NO: 3699 - DNA, 25 bp, Artificial Sequence
  Description of Artificial Sequence: Synthetic probe
tattcggtctacaaagtggggtgag

SEQ ID NO: 3700 - DNA, 25 bp, Artificial Sequence
  Description of Artificial Sequence: Synthetic probe
aagtgcacgacaacctacgacaggg

SEQ ID NO: 3701 - DNA, 25 bp, Artificial Sequence
  Description of Artificial Sequence: Synthetic probe
ctgtgtaagacatgtgtgtctgtgt

SEQ ID NO: 3702 - skipped

SEQ ID NO: 3703 - DNA, 25 bp, Artificial Sequence
  Description of Artificial Sequence: Synthetic probe
tttaaacacatagtaggaacatgcc

SEQ ID NO: 3704 - DNA, 25 bp, Artificial Sequence
  Description of Artificial Sequence: Synthetic probe
tacatcacgtacacatacaacacac

SEQ ID NO: 3705 - DNA, 25 bp, Artificial Sequence
  Description of Artificial Sequence: Synthetic probe
ggctccgacgacatagtcctgctgt

SEQ ID NO: 3706 - DNA, 25 bp, Artificial Sequence
  Description of Artificial Sequence: Synthetic probe
acactcacacacacccgtacggaca

SEQ ID NO: 3707 - DNA, 25 bp, Artificial Sequence
  Description of Artificial Sequence: Synthetic probe
cgaactcccaggtgtgtgtgttaac

SEQ ID NO: 3708 - DNA, 25 bp, Artificial Sequence
  Description of Artificial Sequence: Synthetic probe
ccgtcctccaggctaagcgtccacg

SEQ ID NO: 3709 - DNA, 25 bp, Artificial Sequence
  Description of Artificial Sequence: Synthetic probe
tacctcgactccaggggactgtcgg

SEQ ID NO: 3710 - DNA, 25 bp, Artificial Sequence
  Description of Artificial Sequence: Synthetic probe
accgacacgaccaggcttggaggtc

SEQ ID NO: 3711 - DNA, 25 bp, Artificial Sequence
  Description of Artificial Sequence: Synthetic probe
cgtcacacgtccaggctctactccg

SEQ ID NO: 3712 - DNA, 25 bp, Artificial Sequence
  Description of Artificial Sequence: Synthetic probe
gtccacgacccaggtcctcagagga

SEQ ID NO: 3713 - DNA, 25 bp, Artificial Sequence
  Description of Artificial Sequence: Synthetic probe
tcgctcgcgccagcccttggaggtg

SEQ ID NO: 3714 - DNA, 25 bp, Artificial Sequence
  Description of Artificial Sequence: Synthetic probe
aaggaaccagcgtgtgtggaactgt

SEQ ID NO: 3715 - DNA, 25 bp, Artificial Sequence
  Description of Artificial Sequence: Synthetic probe
cggcgcaccagcacacagacaggga

SEQ ID NO: 3716 - DNA, 25 bp, Artificial Sequence
  Description of Artificial Sequence: Synthetic probe
accacactagcaggcgtaggcatac

SEQ ID NO: 3717 - DNA, 25 bp, Artificial Sequence
  Description of Artificial Sequence: Synthetic probe
aatcgcacgcaggtcagggaccgtg

SEQ ID NO: 3718 - DNA, 25 bp, Artificial Sequence
  Description of Artificial Sequence: Synthetic probe
gtacccgccgcaggagaaaccgcta

SEQ ID NO: 3719 - DNA, 25 bp, Artificial Sequence
  Description of Artificial Sequence: Synthetic probe
agactccgccagatctcgttagatg

SEQ ID NO: 3720 - DNA, 25 bp, Artificial Sequence
  Description of Artificial Sequence: Synthetic probe
gtgtgtgtgccagaaatttgactat

SEQ ID NO: 3721 - DNA, 25 bp, Artificial Sequence
  Description of Artificial Sequence: Synthetic probe
ttacctctccagagcgaccggaaga

SEQ ID NO: 3722 - DNA, 25 bp, Artificial Sequence
  Description of Artificial Sequence: Synthetic probe
ggacacagccagacacacagtcgaa

SEQ ID NO: 3723 - DNA, 25 bp, Artificial Sequence
  Description of Artificial Sequence: Synthetic probe
ccagaggcagatggtggtgaaactt

SEQ ID NO: 3724 - skipped

SEQ ID NO: 3725 - DNA, 25 bp, Artificial Sequence
  Description of Artificial Sequence: Synthetic probe
cttttgtcaggtcgtgcgtgacttg

SEQ ID NO: 3726 - DNA, 25 bp, Artificial Sequence
  Description of Artificial Sequence: Synthetic probe
tagcgtgtgtgtcagggttctgcac

SEQ ID NO: 3727 - DNA, 25 bp, Artificial Sequence
  Description of Artificial Sequence: Synthetic probe
ctcacgtacactcagagactcgttc

SEQ ID NO: 3728 - DNA, 25 bp, Artificial Sequence
  Description of Artificial Sequence: Synthetic probe
acacacacgtactcagagtcagtca

SEQ ID NO: 3729 - DNA, 25 bp, Artificial Sequence
  Description of Artificial Sequence: Synthetic probe
tgtacacacaccagttccgaacgtg

SEQ ID NO: 3730 - DNA, 25 bp, Artificial Sequence
  Description of Artificial Sequence: Synthetic probe
ccgtccaccagtcggttgttcgacg

SEQ ID NO: 3731 - DNA, 25 bp, Artificial Sequence
  Description of Artificial Sequence: Synthetic probe
aagtgtgtgcagtgtctttcaggaa

SEQ ID NO: 3732 - DNA, 25 bp, Artificial Sequence
  Description of Artificial Sequence: Synthetic probe
ccgggtgcagtgtcagtgtgaccac

SEQ ID NO: 3733 - DNA, 25 bp, Artificial Sequence
  Description of Artificial Sequence: Synthetic probe
gtagcaaccacaggccgtccagatt

SEQ ID NO: 3734 - DNA, 25 bp, Artificial Sequence
  Description of Artificial Sequence: Synthetic probe
agccacgcacagctcaaggaagagg

SEQ ID NO: 3735 - DNA, 25 bp, Artificial Sequence
  Description of Artificial Sequence: Synthetic probe
accacgcacacagcgcagggcggag

SEQ ID NO: 3736 - DNA, 25 bp, Artificial Sequence
  Description of Artificial Sequence: Synthetic probe
gtcaatccacaggtcccatccgtag

SEQ ID NO: 3737 - DNA, 25 bp, Artificial Sequence
  Description of Artificial Sequence: Synthetic probe
ggtgaccacacagcatcccgacttg

SEQ ID NO: 3738 - DNA, 25 bp, Artificial Sequence
  Description of Artificial Sequence: Synthetic probe
ggacactccacagcgacacagttgg

SEQ ID NO: 3739 - DNA, 25 bp, Artificial Sequence
  Description of Artificial Sequence: Synthetic probe
agtcgtctcgcacaggcacaacttc

SEQ ID NO: 3740 - DNA, 25 bp, Artificial Sequence
  Description of Artificial Sequence: Synthetic probe
tgcgaccacgacaggtacccgacgg

SEQ ID NO: 3741 - DNA, 25 bp, Artificial Sequence
  Description of Artificial Sequence: Synthetic probe
acaaacacacagaccacacatttac

SEQ ID NO: 3742 - DNA, 25 bp, Artificial Sequence
  Description of Artificial Sequence: Synthetic probe
gaacaggcacagagacacacgtccg

SEQ ID NO: 3743 - DNA, 25 bp, Artificial Sequence
  Description of Artificial Sequence: Synthetic probe
atcgggaacagacgtgaccacctct

SEQ ID NO: 3744 - DNA, 25 bp, Artificial Sequence
  Description of Artificial Sequence: Synthetic probe
ggacctccacagaccgcccatacat

SEQ ID NO: 3745 - DNA, 25 bp, Artificial Sequence
  Description of Artificial Sequence: Synthetic probe
aggtccgacgacagaacgctcaggt

SEQ ID NO: 3746 - DNA, 25 bp, Artificial Sequence
  Description of Artificial Sequence: Synthetic probe
agaaggtctacaggcacgacaccga

SEQ ID NO: 3747 - DNA, 25 bp, Artificial Sequence
  Description of Artificial Sequence: Synthetic probe
actaccaccacagttgtagacgaga

SEQ ID NO: 3748 - DNA, 25 bp, Artificial Sequence
  Description of Artificial Sequence: Synthetic probe
ctagtcggcgacagtgtgcgtgtca

SEQ ID NO: 3749 - DNA, 25 bp, Artificial Sequence
  Description of Artificial Sequence: Synthetic probe
cgtacacacacgacagtctttctct

SEQ ID NO: 3750 - DNA, 25 bp, Artificial Sequence
  Description of Artificial Sequence: Synthetic probe
ttctacacacacagtagaaacgtat

SEQ ID NO: 3751 - DNA, 25 bp, Artificial Sequence
  Description of Artificial Sequence: Synthetic probe
gtggtccaaacgcattacccgactc

SEQ ID NO: 3752 - DNA, 25 bp, Artificial Sequence
  Description of Artificial Sequence: Synthetic probe
ataaggaaacctcgtggtgaaccca

SEQ ID NO: 3753 - DNA, 25 bp, Artificial Sequence
  Description of Artificial Sequence: Synthetic probe
ataagtccaaccgaccatcagtgtc

SEQ ID NO: 3754 - DNA, 25 bp, Artificial Sequence
  Description of Artificial Sequence: Synthetic probe
actaaaccaaccaaccctgaatcag

SEQ ID NO: 3755 - DNA, 25 bp, Artificial Sequence
  Description of Artificial Sequence: Synthetic probe
aggcggcaacccacagactcaagcg

SEQ ID NO: 3756 - DNA, 25 bp, Artificial Sequence
  Description of Artificial Sequence: Synthetic probe
gggccgaaaccgacacatcggagcc

SEQ ID NO: 3757 - DNA, 25 bp, Artificial Sequence
  Description of Artificial Sequence: Synthetic probe
ggtttccaacctaacttcctgacgt

SEQ ID NO: 3758 - DNA, 25 bp, Artificial Sequence
  Description of Artificial Sequence: Synthetic probe
atatcgacgcaaccaccgacggtct

SEQ ID NO: 3759 - DNA, 25 bp, Artificial Sequence
  Description of Artificial Sequence: Synthetic probe
gcacacacgtcaaccgcccgaacag

SEQ ID NO: 3760 - DNA, 25 bp, Artificial Sequence
  Description of Artificial Sequence: Synthetic probe
gatcggacgacaacccgacgcaaag

SEQ ID NO: 3761 - DNA, 25 bp, Artificial Sequence
  Description of Artificial Sequence: Synthetic probe
acccgcagaacctgccttaggtgga

SEQ ID NO: 3762 - DNA, 25 bp, Artificial Sequence
  Description of Artificial Sequence: Synthetic probe
accctaaaacagacagttcgagtag

SEQ ID NO: 3763 - DNA, 25 bp, Artificial Sequence
  Description of Artificial Sequence: Synthetic probe
cggtaacaaacacacgaccacggtt

SEQ ID NO: 3764 - DNA, 25 bp, Artificial Sequence
  Description of Artificial Sequence: Synthetic probe
tgcaacgcgaacaacgactccatcg

SEQ ID NO: 3765 - DNA, 25 bp, Artificial Sequence
  Description of Artificial Sequence: Synthetic probe
tgttgggaacatgcgaccgccgacc

SEQ ID NO: 3766 - DNA, 25 bp, Artificial Sequence
  Description of Artificial Sequence: Synthetic probe
caccgacacgaacaggacctggtag

SEQ ID NO: 3767 - DNA, 25 bp, Artificial Sequence
  Description of Artificial Sequence: Synthetic probe
ggacccacgaacaactacattagaa

SEQ ID NO: 3768 - DNA, 25 bp, Artificial Sequence
  Description of Artificial Sequence: Synthetic probe
ggacgcaccgaacattttagactac

SEQ ID NO: 3769 - DNA, 25 bp, Artificial Sequence
  Description of Artificial Sequence: Synthetic probe
taccgtcctataaccctttacaaaa

SEQ ID NO: 3770 - DNA, 25 bp, Artificial Sequence
  Description of Artificial Sequence: Synthetic probe
ctaaagaaacttgtgtttgtggcac

SEQ ID NO: 3771 - DNA, 25 bp, Artificial Sequence
  Description of Artificial Sequence: Synthetic probe
caaaaaacttaacaggtcacggaca

SEQ ID NO: 3772 - DNA, 25 bp, Artificial Sequence
  Description of Artificial Sequence: Synthetic probe
gtacgtcccacgaactctctaaggg

SEQ ID NO: 3773 - DNA, 25 bp, Artificial Sequence
  Description of Artificial Sequence: Synthetic probe
cgacgaacgacaactaccgaggcgc

SEQ ID NO: 3774 - DNA, 25 bp, Artificial Sequence
  Description of Artificial Sequence: Synthetic probe
agacacttgtaactgccgccgacga

SEQ ID NO: 3775 - DNA, 25 bp, Artificial Sequence
  Description of Artificial Sequence: Synthetic probe
gactatcgcaaacggcaaccacggg

SEQ ID NO: 3776 - DNA, 25 bp, Artificial Sequence
  Description of Artificial Sequence: Synthetic probe
ctcgactcgacaacgaaactttcgg

SEQ ID NO: 3777 - DNA, 25 bp, Artificial Sequence
  Description of Artificial Sequence: Synthetic probe
gggacgaacaacgactaccgcagct

SEQ ID NO: 3778 - DNA, 25 bp, Artificial Sequence
  Description of Artificial Sequence: Synthetic probe
ccacgttctaacgtgggtgttgacc

SEQ ID NO: 3779 - DNA, 25 bp, Artificial Sequence
  Description of Artificial Sequence: Synthetic probe
tgccggtccaccgtgccctcggcgc

SEQ ID NO: 3780 - DNA, 25 bp, Artificial Sequence
  Description of Artificial Sequence: Synthetic probe
ggttccgccgatcccgccgcttcag

SEQ ID NO: 3781 - DNA, 25 bp, Artificial Sequence
  Description of Artificial Sequence: Synthetic probe
gtattataggaacgtctactctgtg

SEQ ID NO: 3782 - DNA, 25 bp, Artificial Sequence
  Description of Artificial Sequence: Synthetic probe
agaggccacacacctccgcttcaga

SEQ ID NO: 3783 - DNA, 25 bp, Artificial Sequence
  Description of Artificial Sequence: Synthetic probe
ttctcactaccaccatcgcataaag

SEQ ID NO: 3784 - DNA, 25 bp, Artificial Sequence
  Description of Artificial Sequence: Synthetic probe
taaaaaccaccaccgctgttagggt

SEQ ID NO: 3785 - DNA, 25 bp, Artificial Sequence
  Description of Artificial Sequence: Synthetic probe
aggcacgccaccactatcgggaaga

SEQ ID NO: 3786 - DNA, 25 bp, Artificial Sequence
  Description of Artificial Sequence: Synthetic probe
acaacacccaccaacagggagctgt

SEQ ID NO: 3787 - DNA, 25 bp, Artificial Sequence
  Description of Artificial Sequence: Synthetic probe
gtcctcacccaccaccgacccaggt

SEQ ID NO: 3788 - DNA, 25 bp, Artificial Sequence
  Description of Artificial Sequence: Synthetic probe
agtctaccgccaccctaccagaggt

SEQ ID NO: 3789 - DNA, 25 bp, Artificial Sequence
  Description of Artificial Sequence: Synthetic probe
ggaacacgtccaccatcagccggag

SEQ ID NO: 3790 - DNA, 25 bp, Artificial Sequence
  Description of Artificial Sequence: Synthetic probe
gacctcgtcaccaccttcggtgggg

SEQ ID NO: 3791 - DNA, 25 bp, Artificial Sequence
  Description of Artificial Sequence: Synthetic probe
tatcaacgaccaccatgtaatatct

SEQ ID NO: 3792 - DNA, 25 bp, Artificial Sequence
  Description of Artificial Sequence: Synthetic probe
agtcgccgtccacctagacacgccc

SEQ ID NO: 3793 - DNA, 25 bp, Artificial Sequence
  Description of Artificial Sequence: Synthetic probe
gaggacacggcacccaccacagggg

SEQ ID NO: 3794 - DNA, 25 bp, Artificial Sequence
  Description of Artificial Sequence: Synthetic probe
tttccgtcgcaccacgggttaattt

SEQ ID NO: 3795 - DNA, 25 bp, Artificial Sequence
  Description of Artificial Sequence: Synthetic probe
aagtgttccaccacagcgactccgg

SEQ ID NO: 3796 - DNA, 25 bp, Artificial Sequence
  Description of Artificial Sequence: Synthetic probe
ttgggtccaccactacgcacacgag

SEQ ID NO: 3797 - DNA, 25 bp, Artificial Sequence
  Description of Artificial Sequence: Synthetic probe
cacgtccgccacctcatgttgtaga

SEQ ID NO: 3798 - DNA, 25 bp, Artificial Sequence
  Description of Artificial Sequence: Synthetic probe
gtctccgtcccacctaagatagtgg

SEQ ID NO: 3799 - DNA, 25 bp, Artificial Sequence
  Description of Artificial Sequence: Synthetic probe
agagtccgtccacctgttaatgtca

SEQ ID NO: 3800 - DNA, 25 bp, Artificial Sequence
  Description of Artificial Sequence: Synthetic probe
atcaacgaccaccatgtaatatctt

SEQ ID NO: 3801 - DNA, 25 bp, Artificial Sequence
  Description of Artificial Sequence: Synthetic probe
gtcctagtcaccaccggtccagtgg

SEQ ID NO: 3802 - DNA, 25 bp, Artificial Sequence
  Description of Artificial Sequence: Synthetic probe
gtggatggcacctacctacgtacgc

SEQ ID NO: 3803 - DNA, 25 bp, Artificial Sequence
  Description of Artificial Sequence: Synthetic probe
gtatctccgccaccgaagtagttcc

SEQ ID NO: 3804 - DNA, 25 bp, Artificial Sequence
  Description of Artificial Sequence: Synthetic probe
tcccgtagcgcacccacactccgag

SEQ ID NO: 3805 - DNA, 25 bp, Artificial Sequence
  Description of Artificial Sequence: Synthetic probe
agtccgggcaccttaactagtggtc

SEQ ID NO: 3806 - DNA, 25 bp, Artificial Sequence
  Description of Artificial Sequence: Synthetic probe
acgacgctctgcaccaccacctgaa

SEQ ID NO: 3807 - DNA, 25 bp, Artificial Sequence
  Description of Artificial Sequence: Synthetic probe
aagtactagccaccgacgattcgag

SEQ ID NO: 3808 - DNA, 25 bp, Artificial Sequence
  Description of Artificial Sequence: Synthetic probe
acacaaccgcacctttagaagactg

SEQ ID NO: 3809 - DNA, 25 bp, Artificial Sequence
  Description of Artificial Sequence: Synthetic probe
ccacgccgcactcagggttaagttt

SEQ ID NO: 3810 - DNA, 25 bp, Artificial Sequence
  Description of Artificial Sequence: Synthetic probe
actaccggacgcaccgaggacaaca

SEQ ID NO: 3811 - DNA, 25 bp, Artificial Sequence
  Description of Artificial Sequence: Synthetic probe
ggtcttcccacaccgaaaccgtagt

SEQ ID NO: 3812 - DNA, 25 bp, Artificial Sequence
  Description of Artificial Sequence: Synthetic probe
agtcccgccacaatagcgcgtcaat

SEQ ID NO: 3813 - DNA, 25 bp, Artificial Sequence
  Description of Artificial Sequence: Synthetic probe
agcaccaccacaagacgtcgcgtta

SEQ ID NO: 3814 - DNA, 25 bp, Artificial Sequence
  Description of Artificial Sequence: Synthetic probe
aggacgcaccacactcccaaagttg

SEQ ID NO: 3815 - DNA, 25 bp, Artificial Sequence
  Description of Artificial Sequence: Synthetic probe
gtagacaccgtccacaaataggcgg

SEQ ID NO: 3816 - DNA, 25 bp, Artificial Sequence
  Description of Artificial Sequence: Synthetic probe
actccgacgaccacaatagaagacc

SEQ ID NO: 3817 - DNA, 25 bp, Artificial Sequence
  Description of Artificial Sequence: Synthetic probe
gggcacacgcacacacaggaaccgg

SEQ ID NO: 3818 - DNA, 25 bp, Artificial Sequence
  Description of Artificial Sequence: Synthetic probe
gtcttccgccacagagttttcccta

SEQ ID NO: 3819 - DNA, 25 bp, Artificial Sequence
  Description of Artificial Sequence: Synthetic probe
gtacccgacccacactatcaggatg

SEQ ID NO: 3820 - DNA, 25 bp, Artificial Sequence
  Description of Artificial Sequence: Synthetic probe
tatatatacccacacgctcacacat

SEQ ID NO: 3821 - DNA, 25 bp, Artificial Sequence
  Description of Artificial Sequence: Synthetic probe
gttcacacgccacacgggaaactgg

SEQ ID NO: 3822 - DNA, 25 bp, Artificial Sequence
  Description of Artificial Sequence: Synthetic probe
taagaccgtccacacaacgtcttta

SEQ ID NO: 3823 - DNA, 25 bp, Artificial Sequence
  Description of Artificial Sequence: Synthetic probe
gtgtaagacaccacacacgtcatgt

SEQ ID NO: 3824 - DNA, 25 bp, Artificial Sequence
  Description of Artificial Sequence: Synthetic probe
gtaactgagaccacacacttccggg

SEQ ID NO: 3825 - DNA, 25 bp, Artificial Sequence
  Description of Artificial Sequence: Synthetic probe
tcccacccacacgttttacaagtgg

SEQ ID NO: 3826 - DNA, 25 bp, Artificial Sequence
  Description of Artificial Sequence: Synthetic probe
gaggatatgcgacctgcgcccagcc

SEQ ID NO: 3827 - DNA, 25 bp, Artificial Sequence
  Description of Artificial Sequence: Synthetic probe
gtacgcgtcacaccacacctgtccc

SEQ ID NO: 3828 - DNA, 25 bp, Artificial Sequence
  Description of Artificial Sequence: Synthetic probe
actacgcaagcacactgagggtcca

SEQ ID NO: 3829 - DNA, 25 bp, Artificial Sequence
  Description of Artificial Sequence: Synthetic probe
gtcccgaccgcacaactacaggtgt

SEQ ID NO: 3830 - DNA, 25 bp, Artificial Sequence
  Description of Artificial Sequence: Synthetic probe
cggacgcacgcacaccacttgagga

SEQ ID NO: 3831 - DNA, 25 bp, Artificial Sequence
  Description of Artificial Sequence: Synthetic probe
agtcatgtcgcacacgtacacctgg

SEQ ID NO: 3832 - DNA, 25 bp, Artificial Sequence
  Description of Artificial Sequence: Synthetic probe
gtttagccgcacacgcatgagactt

SEQ ID NO: 3833 - DNA, 25 bp, Artificial Sequence
  Description of Artificial Sequence: Synthetic probe
gtggttactacgcacacctgtcccg

SEQ ID NO: 3834 - DNA, 25 bp, Artificial Sequence
  Description of Artificial Sequence: Synthetic probe
gcgcaccgactcaccacaaatgtaa

SEQ ID NO: 3835 - DNA, 25 bp, Artificial Sequence
  Description of Artificial Sequence: Synthetic probe
gtcacggagatcaccaacgaccctt

SEQ ID NO: 3836 - DNA, 25 bp, Artificial Sequence
  Description of Artificial Sequence: Synthetic probe
gttaaaatcacctagtctacgagtc

SEQ ID NO: 3837 - DNA, 25 bp, Artificial Sequence
  Description of Artificial Sequence: Synthetic probe
cttaggagtcaccacacgacacaac

SEQ ID NO: 3838 - DNA, 25 bp, Artificial Sequence
  Description of Artificial Sequence: Synthetic probe
actagagggtcaccacacacgcacg

SEQ ID NO: 3839 - DNA, 25 bp, Artificial Sequence
  Description of Artificial Sequence: Synthetic probe
cagacactgtcacctcttctaaggg

SEQ ID NO: 3840 - DNA, 25 bp, Artificial Sequence
  Description of Artificial Sequence: Synthetic probe
agcctcactcacacacgcgccggcg

SEQ ID NO: 3841 - DNA, 25 bp, Artificial Sequence
  Description of Artificial Sequence: Synthetic probe
acacgtgcacacacccatttgtaac

SEQ ID NO: 3842 - DNA, 25 bp, Artificial Sequence
  Description of Artificial Sequence: Synthetic probe
actcaccaccactgtagatccaggt

SEQ ID NO: 3843 - DNA, 25 bp, Artificial Sequence
  Description of Artificial Sequence: Synthetic probe
ctacagaggcactcagacacggagg

SEQ ID NO: 3844 - DNA, 25 bp, Artificial Sequence
  Description of Artificial Sequence: Synthetic probe
acgtcacacggcactcatccaatgt

SEQ ID NO: 3845 - DNA, 25 bp, Artificial Sequence
  Description of Artificial Sequence: Synthetic probe
agtgtgtacgtgcactttgaggtca

SEQ ID NO: 3846 - DNA, 25 bp, Artificial Sequence
  Description of Artificial Sequence: Synthetic probe
acacacacaccactaatcgtacgga

SEQ ID NO: 3847 - DNA, 25 bp, Artificial Sequence
  Description of Artificial Sequence: Synthetic probe
cagacgacgtcgcactccggtgtga

SEQ ID NO: 3848 - DNA, 25 bp, Artificial Sequence
  Description of Artificial Sequence: Synthetic probe
agaaacatcactccgccgtccatgg

SEQ ID NO: 3849 - DNA, 25 bp, Artificial Sequence
  Description of Artificial Sequence: Synthetic probe
gtggctgaacaccatccgccgcagg

SEQ ID NO: 3850 - DNA, 25 bp, Artificial Sequence
  Description of Artificial Sequence: Synthetic probe
ggtttccgtcactccataaaggact

SEQ ID NO: 3851 - DNA, 25 bp, Artificial Sequence
  Description of Artificial Sequence: Synthetic probe
acgttccgcacacacatgatgatag

SEQ ID NO: 3852 - DNA, 25 bp, Artificial Sequence
  Description of Artificial Sequence: Synthetic probe
taaaatcacacacacgatgagttcg

SEQ ID NO: 3853 - DNA, 25 bp, Artificial Sequence
  Description of Artificial Sequence: Synthetic probe
gtcgcccacacaccgcaaagccgag

SEQ ID NO: 3854 - skipped

SEQ ID NO: 3855 - DNA, 25 bp, Artificial Sequence
  Description of Artificial Sequence: Synthetic probe
ggacccgtcacaccactccgaggta

SEQ ID NO: 3856 - DNA, 25 bp, Artificial Sequence
  Description of Artificial Sequence: Synthetic probe
gtaagtcaccacacccaccaatccg

SEQ ID NO: 3857 - DNA, 25 bp, Artificial Sequence
  Description of Artificial Sequence: Synthetic probe
acacgtggacacaccctaggagtca

SEQ ID NO: 3858 - DNA, 25 bp, Artificial Sequence
  Description of Artificial Sequence: Synthetic probe
acacgcggacacacccacgtgtaaa

SEQ ID NO: 3859 - DNA, 25 bp, Artificial Sequence
  Description of Artificial Sequence: Synthetic probe
acccgacacacaccgcgggaaagga

SEQ ID NO: 3860 - DNA, 25 bp, Artificial Sequence
  Description of Artificial Sequence: Synthetic probe
cacagagacacaccaaaacagacac

SEQ ID NO: 3861 - DNA, 25 bp, Artificial Sequence
  Description of Artificial Sequence: Synthetic probe
acacacagacacaccaaaacagaca

SEQ ID NO: 3862 - DNA, 25 bp, Artificial Sequence
  Description of Artificial Sequence: Synthetic probe
ctcccacacacacaatcacactcac

SEQ ID NO: 3863 - DNA, 25 bp, Artificial Sequence
  Description of Artificial Sequence: Synthetic probe
tgcgtccgcacaccgagagcaagta

SEQ ID NO: 3864 - DNA, 25 bp, Artificial Sequence
  Description of Artificial Sequence: Synthetic probe
gaacctgagacaccacacacgaact

SEQ ID NO: 3865 - DNA, 25 bp, Artificial Sequence
  Description of Artificial Sequence: Synthetic probe
agacactccacaccgtgccgcagac

SEQ ID NO: 3866 - DNA, 25 bp, Artificial Sequence
  Description of Artificial Sequence: Synthetic probe
gtcgtcacgggacaccaactcgtgt

SEQ ID NO: 3867 - DNA, 25 bp, Artificial Sequence
  Description of Artificial Sequence: Synthetic probe
aggagggacacaccacgtgctacct

SEQ ID NO: 3868 - DNA, 25 bp, Artificial Sequence
  Description of Artificial Sequence: Synthetic probe
ggtgacaccgacaccaaggtgccac

SEQ ID NO: 3869 - DNA, 25 bp, Artificial Sequence
  Description of Artificial Sequence: Synthetic probe
gaggccacgacacacgcttggtctc

SEQ ID NO: 3870 - DNA, 25 bp, Artificial Sequence
  Description of Artificial Sequence: Synthetic probe
gaagaagcacacacacagaaccgga

SEQ ID NO: 3871 - DNA, 25 bp, Artificial Sequence
  Description of Artificial Sequence: Synthetic probe
ttccgcacacacatgatgatagtag

SEQ ID NO: 3872 - DNA, 25 bp, Artificial Sequence
  Description of Artificial Sequence: Synthetic probe
gtaatcgtaggacaccgacgccagt

SEQ ID NO: 3873 - DNA, 25 bp, Artificial Sequence
  Description of Artificial Sequence: Synthetic probe
agacgtacgccgacacccagtgtaa

SEQ ID NO: 3874 - DNA, 25 bp, Artificial Sequence
  Description of Artificial Sequence: Synthetic probe
acacacaaacacaggcacacgtaca

SEQ ID NO: 3875 - DNA, 25 bp, Artificial Sequence
  Description of Artificial Sequence: Synthetic probe
tgaccaacacacaccgtacccagaa

SEQ ID NO: 3876 - DNA, 25 bp, Artificial Sequence
  Description of Artificial Sequence: Synthetic probe
acatactcacacacagacttactca

SEQ ID NO: 3877 - DNA, 25 bp, Artificial Sequence
  Description of Artificial Sequence: Synthetic probe
tcagggcacacacggggaatgtcac

SEQ ID NO: 3878 - DNA, 25 bp, Artificial Sequence
  Description of Artificial Sequence: Synthetic probe
cactcaccacacacgggtaccaggg

SEQ ID NO: 3879 - DNA, 25 bp, Artificial Sequence
  Description of Artificial Sequence: Synthetic probe
cctgtaccacacaccaagaaaatcg

SEQ ID NO: 3880 - DNA, 25 bp, Artificial Sequence
  Description of Artificial Sequence: Synthetic probe
gtgcgaccgaacacacaccctatgg

SEQ ID NO: 3881 - DNA, 25 bp, Artificial Sequence
  Description of Artificial Sequence: Synthetic probe
gtgcttacacacacacggttccggg

SEQ ID NO: 3882 - DNA, 25 bp, Artificial Sequence
  Description of Artificial Sequence: Synthetic probe
actacgactggacacaccggattcc

SEQ ID NO: 3883 - DNA, 25 bp, Artificial Sequence
  Description of Artificial Sequence: Synthetic probe
ggtcacacgctacacacagaagttt

SEQ ID NO: 3884 - DNA, 25 bp, Artificial Sequence
  Description of Artificial Sequence: Synthetic probe
gcccacactacacagaccagtaatg

SEQ ID NO: 3885 - DNA, 25 bp, Artificial Sequence
  Description of Artificial Sequence: Synthetic probe
acgtacgaacgacacacacacacga

SEQ ID NO: 3886 - DNA, 25 bp, Artificial Sequence
  Description of Artificial Sequence: Synthetic probe
tcaaatcacacacacgacggtctcg

SEQ ID NO: 3887 - DNA, 25 bp, Artificial Sequence
  Description of Artificial Sequence: Synthetic probe
ccttacacacacacgatatcaaagt

SEQ ID NO: 3888 - DNA, 25 bp, Artificial Sequence
  Description of Artificial Sequence: Synthetic probe
aaatcacacacacgacggtctcgtt

SEQ ID NO: 3889 - DNA, 25 bp, Artificial Sequence
  Description of Artificial Sequence: Synthetic probe
caaatcacacacacgacggtctcgt

SEQ ID NO: 3890 - DNA, 25 bp, Artificial Sequence
  Description of Artificial Sequence: Synthetic probe
tcacgtttcacacacgttatcctag

SEQ ID NO: 3891 - DNA, 25 bp, Artificial Sequence
  Description of Artificial Sequence: Synthetic probe
gtaaacacggacacaccgggagttt

SEQ ID NO: 3892 - DNA, 25 bp, Artificial Sequence
  Description of Artificial Sequence: Synthetic probe
gcgaacgacacacacacgatcgaca

SEQ ID NO: 3893 - DNA, 25 bp, Artificial Sequence
  Description of Artificial Sequence: Synthetic probe
ataagacggacacacccatcgtcgt

SEQ ID NO: 3894 - DNA, 25 bp, Artificial Sequence
  Description of Artificial Sequence: Synthetic probe
cacaccttacaccacacactcttac

SEQ ID NO: 3895 - DNA, 25 bp, Artificial Sequence
  Description of Artificial Sequence: Synthetic probe
cacacacttacacagatacttatac

SEQ ID NO: 3896 - DNA, 25 bp, Artificial Sequence
  Description of Artificial Sequence: Synthetic probe
atacagggtacaccaggtccgaatc

SEQ ID NO: 3897 - DNA, 25 bp, Artificial Sequence
  Description of Artificial Sequence: Synthetic probe
ctacacgctgtacaccacggggctg

SEQ ID NO: 3898 - DNA, 25 bp, Artificial Sequence
  Description of Artificial Sequence: Synthetic probe
acaccgcacgtacacagtcttgagg

SEQ ID NO: 3899 - DNA, 25 bp, Artificial Sequence
  Description of Artificial Sequence: Synthetic probe
acacacgatcgacacacacgtacga

SEQ ID NO: 3900 - DNA, 25 bp, Artificial Sequence
  Description of Artificial Sequence: Synthetic probe
gtttaccacgtacacacgcgcttgc

SEQ ID NO: 3901 - DNA, 25 bp, Artificial Sequence
  Description of Artificial Sequence: Synthetic probe
tctgcacacacactcggtcggaacg

SEQ ID NO: 3902 - DNA, 25 bp, Artificial Sequence
  Description of Artificial Sequence: Synthetic probe
ctttccacacttgtgtgtgtcggtc

SEQ ID NO: 3903 - DNA, 25 bp, Artificial Sequence
  Description of Artificial Sequence: Synthetic probe
agtaccacacacactttgagtttaa

SEQ ID NO: 3904 - DNA, 25 bp, Artificial Sequence
  Description of Artificial Sequence: Synthetic probe
cacaatcacactcacatacaccctc

SEQ ID NO: 3905 - DNA, 25 bp, Artificial Sequence
  Description of Artificial Sequence: Synthetic probe
gttgtgtgtgacactgagccctgac

SEQ ID NO: 3906 - DNA, 25 bp, Artificial Sequence
  Description of Artificial Sequence: Synthetic probe
ggtgaagacacactctacggcccga

SEQ ID NO: 3907 - DNA, 25 bp, Artificial Sequence
  Description of Artificial Sequence: Synthetic probe
gtggtgtgtgacactctaggaactc

SEQ ID NO: 3908 - DNA, 25 bp, Artificial Sequence
  Description of Artificial Sequence: Synthetic probe
acagacgtcggacactcgttagtgg

SEQ ID NO: 3909 - DNA, 25 bp, Artificial Sequence
  Description of Artificial Sequence: Synthetic probe
cgagtacacacgtacacttttgggt

SEQ ID NO: 3910 - DNA, 25 bp, Artificial Sequence
  Description of Artificial Sequence: Synthetic probe
ggattccgacacgacaggtgatact

SEQ ID NO: 3911 - DNA, 25 bp, Artificial Sequence
  Description of Artificial Sequence: Synthetic probe
gtccacactcacactacagtaagag

SEQ ID NO: 3912 - DNA, 25 bp, Artificial Sequence
  Description of Artificial Sequence: Synthetic probe
gtgcacactctacactcacggacac

SEQ ID NO: 3913 - DNA, 25 bp, Artificial Sequence
  Description of Artificial Sequence: Synthetic probe
cgccgcaccacgactggcggatggt

SEQ ID NO: 3914 - DNA, 25 bp, Artificial Sequence
  Description of Artificial Sequence: Synthetic probe
acgaacaggcacgcagacagacgga

SEQ ID NO: 3915 - DNA, 25 bp, Artificial Sequence
  Description of Artificial Sequence: Synthetic probe
aactcacacgtacactatacacttg

SEQ ID NO: 3916 - DNA, 25 bp, Artificial Sequence
  Description of Artificial Sequence: Synthetic probe
cagacacgagcacgatgattatttc

SEQ ID NO: 3917 - skipped

SEQ ID NO: 3918 - DNA, 25 bp, Artificial Sequence
  Description of Artificial Sequence: Synthetic probe
ctggacaccacggacaccaccgagt

SEQ ID NO: 3919 - skipped

SEQ ID NO: 3920 - DNA, 25 bp, Artificial Sequence
  Description of Artificial Sequence: Synthetic probe
atctcgcccacgaccacgcacgtcg

SEQ ID NO: 3921 - DNA, 25 bp, Artificial Sequence
  Description of Artificial Sequence: Synthetic probe
gtaacgacacgccacgaactcacgg

SEQ ID NO: 3922 - DNA, 25 bp, Artificial Sequence
  Description of Artificial Sequence: Synthetic probe
actcaacgaccacgagtgtggccac

SEQ ID NO: 3923 - skipped

SEQ ID NO: 3924 - DNA, 25 bp, Artificial Sequence
  Description of Artificial Sequence: Synthetic probe
agggcgaccacgacctcatgcgtga

SEQ ID NO: 3925 - DNA, 25 bp, Artificial Sequence
  Description of Artificial Sequence: Synthetic probe
gtggagtggtcacggtagacagttt

SEQ ID NO: 3926 - DNA, 25 bp, Artificial Sequence
  Description of Artificial Sequence: Synthetic probe
gtgcaggcacacgtacatgaccagt

SEQ ID NO: 3927 - DNA, 25 bp, Artificial Sequence
  Description of Artificial Sequence: Synthetic probe
gtgagtccgacgcacgacgtaccta

SEQ ID NO: 3928 - DNA, 25 bp, Artificial Sequence
  Description of Artificial Sequence: Synthetic probe
gtgcaatcacacgtccgtacaacgg

SEQ ID NO: 3929 - DNA, 25 bp, Artificial Sequence
  Description of Artificial Sequence: Synthetic probe
ggacacacccacgtgtaaacacaca

SEQ ID NO: 3930 - DNA, 25 bp, Artificial Sequence
  Description of Artificial Sequence: Synthetic probe
acgcactcacgtcacggaaacgcga

SEQ ID NO: 3931 - DNA, 25 bp, Artificial Sequence
  Description of Artificial Sequence: Synthetic probe
agaggtcctacacgctctcggacgg

SEQ ID NO: 3932 - DNA, 25 bp, Artificial Sequence
  Description of Artificial Sequence: Synthetic probe
taaatgctcacgacacgaccgccgg

SEQ ID NO: 3933 - DNA, 25 bp, Artificial Sequence
  Description of Artificial Sequence: Synthetic probe
tacacacggacacacgcaggcgcgc

SEQ ID NO: 3934 - DNA, 25 bp, Artificial Sequence
  Description of Artificial Sequence: Synthetic probe
gaacacgcacacacggaagatcccg

SEQ ID NO: 3935 - skipped

SEQ ID NO: 3936 - DNA, 25 bp, Artificial Sequence
  Description of Artificial Sequence: Synthetic probe
acgcagaacacacgaccaaagggca

SEQ ID NO: 3937 - DNA, 25 bp, Artificial Sequence
  Description of Artificial Sequence: Synthetic probe
acgcacgcgcacacggcaagagatc

SEQ ID NO: 3938 - DNA, 25 bp, Artificial Sequence
  Description of Artificial Sequence: Synthetic probe
acacttccacacgtctcatggttat

SEQ ID NO: 3939 - DNA, 25 bp, Artificial Sequence
  Description of Artificial Sequence: Synthetic probe
gtacacacggacacacgcaggcgcg

SEQ ID NO: 3940 - DNA, 25 bp, Artificial Sequence
  Description of Artificial Sequence: Synthetic probe
gcccgacgcacacggtcttctcgta

SEQ ID NO: 3941 - DNA, 25 bp, Artificial Sequence
  Description of Artificial Sequence: Synthetic probe
ctgagcctcacgtagtccgacgatg

SEQ ID NO: 3942 - DNA, 25 bp, Artificial Sequence
  Description of Artificial Sequence: Synthetic probe
ctcctacacacacgtcttaagtgag

SEQ ID NO: 3943 - DNA, 25 bp, Artificial Sequence
  Description of Artificial Sequence: Synthetic probe
tacggacacttacacgcacacgtac

SEQ ID NO: 3944 - DNA, 25 bp, Artificial Sequence
  Description of Artificial Sequence: Synthetic probe
aatcacacacacgacggtctcgttc

SEQ ID NO: 3945 - DNA, 25 bp, Artificial Sequence
  Description of Artificial Sequence: Synthetic probe
gtacactcccacacgtgcgtacata

SEQ ID NO: 3946 - DNA, 25 bp, Artificial Sequence
  Description of Artificial Sequence: Synthetic probe
gttcgaccacgacacgtccaaagga

SEQ ID NO: 3947 - DNA, 25 bp, Artificial Sequence
  Description of Artificial Sequence: Synthetic probe
gtctctgtacgcacacgacggaaag

SEQ ID NO: 3948 - DNA, 25 bp, Artificial Sequence
  Description of Artificial Sequence: Synthetic probe
acattcactacacgaacacgacggt

SEQ ID NO: 3949 - DNA, 25 bp, Artificial Sequence
  Description of Artificial Sequence: Synthetic probe
ttgtgttgacacgacaccaggtacg

SEQ ID NO: 3950 - DNA, 25 bp, Artificial Sequence
  Description of Artificial Sequence: Synthetic probe
aaatcacgtacacgacgactttgct

SEQ ID NO: 3951 - DNA, 25 bp, Artificial Sequence
  Description of Artificial Sequence: Synthetic probe
ccgtcggaacacgtcacgtcagagt

SEQ ID NO: 3952 - DNA, 25 bp, Artificial Sequence
  Description of Artificial Sequence: Synthetic probe
gtctacacccgacacgagtaagaag

SEQ ID NO: 3953 - DNA, 25 bp, Artificial Sequence
  Description of Artificial Sequence: Synthetic probe
acacacccgtacacggacgagggtg

SEQ ID NO: 3954 - DNA, 25 bp, Artificial Sequence
  Description of Artificial Sequence: Synthetic probe
actgatgggatgcaagaggatgttt

SEQ ID NO: 3955 - DNA, 25 bp, Artificial Sequence
  Description of Artificial Sequence: Synthetic probe
cgttagtcacgacacgtaattcata

SEQ ID NO: 3956 - DNA, 25 bp, Artificial Sequence
  Description of Artificial Sequence: Synthetic probe
cgtgtggtggaaacgtgacagacat

SEQ ID NO: 3957 - DNA, 25 bp, Artificial Sequence
  Description of Artificial Sequence: Synthetic probe
cggtgtgtggaagagaccacatgta

SEQ ID NO: 3958 - DNA, 25 bp, Artificial Sequence
  Description of Artificial Sequence: Synthetic probe
agtacgcttggaagatacgtaacaa

SEQ ID NO: 3959 - DNA, 25 bp, Artificial Sequence
  Description of Artificial Sequence: Synthetic probe
aaagaacggaacgaccattctaaag

SEQ ID NO: 3960 - DNA, 25 bp, Artificial Sequence
  Description of Artificial Sequence: Synthetic probe
acccgcaggaacgactggagcatct

SEQ ID NO: 3961 - DNA, 25 bp, Artificial Sequence
  Description of Artificial Sequence: Synthetic probe
ccagcaggaacggaaacgataggtg

SEQ ID NO: 3962 - DNA, 25 bp, Artificial Sequence
  Description of Artificial Sequence: Synthetic probe
acgtccgtccggaacagtatagagg

SEQ ID NO: 3963 - skipped

SEQ ID NO: 3964 - DNA, 25 bp, Artificial Sequence
  Description of Artificial Sequence: Synthetic probe
cccgcactgaagtgtgtgtcagccc

SEQ ID NO: 3965 - DNA, 25 bp, Artificial Sequence
  Description of Artificial Sequence: Synthetic probe
acgactgtggtgaaaagagagaccg

SEQ ID NO: 3966 - DNA, 25 bp, Artificial Sequence
  Description of Artificial Sequence: Synthetic probe
cggtgtgtgtgaagtgacgcaaata

SEQ ID NO: 3967 - DNA, 25 bp, Artificial Sequence
  Description of Artificial Sequence: Synthetic probe
gtactgtttgtgaattgtctcatca

SEQ ID NO: 3968 - DNA, 25 bp, Artificial Sequence
  Description of Artificial Sequence: Synthetic probe
ataggggtgaattgtgtgcgtactt

SEQ ID NO: 3969 - DNA, 25 bp, Artificial Sequence
  Description of Artificial Sequence: Synthetic probe
agtgtctgtcgtgaataatttagtc

SEQ ID NO: 3970 - DNA, 25 bp, Artificial Sequence
  Description of Artificial Sequence: Synthetic probe
tcggtggtgtgaaccagttgataaa

SEQ ID NO: 3971 - DNA, 25 bp, Artificial Sequence
  Description of Artificial Sequence: Synthetic probe
acgtgggtcggatttaagttttaga

SEQ ID NO: 3972 - DNA, 25 bp, Artificial Sequence
  Description of Artificial Sequence: Synthetic probe
gtgttgtgcggatgtcttgtcgttt

SEQ ID NO: 3973 - DNA, 25 bp, Artificial Sequence
  Description of Artificial Sequence: Synthetic probe
gctacgttgggatcgctagtcaccc

SEQ ID NO: 3974 - DNA, 25 bp, Artificial Sequence
  Description of Artificial Sequence: Synthetic probe
ctcctaccggatagagtgtgtactt

SEQ ID NO: 3975 - DNA, 25 bp, Artificial Sequence
  Description of Artificial Sequence: Synthetic probe
cgagtgtcttgatgtgtgcgttcca

SEQ ID NO: 3976 - DNA, 25 bp, Artificial Sequence
  Description of Artificial Sequence: Synthetic probe
agtaagtgtgtgattagatgggtaa

SEQ ID NO: 3977 - DNA, 25 bp, Artificial Sequence
  Description of Artificial Sequence: Synthetic probe
cgtggtggtgatccttcttccggtc

SEQ ID NO: 3978 - DNA, 25 bp, Artificial Sequence
  Description of Artificial Sequence: Synthetic probe
acccgtgtgtgatatggggactacc

SEQ ID NO: 3979 - DNA, 25 bp, Artificial Sequence
  Description of Artificial Sequence: Synthetic probe
atgtgtgtgtgatgtcgtatgtttt

SEQ ID NO: 3980 - DNA, 25 bp, Artificial Sequence
  Description of Artificial Sequence: Synthetic probe
gctattgcgtgatgaaagtgtggtc

SEQ ID NO: 3981 - DNA, 25 bp, Artificial Sequence
  Description of Artificial Sequence: Synthetic probe
tgacaaagtgatgagtcgtaccttt

SEQ ID NO: 3982 - DNA, 25 bp, Artificial Sequence
  Description of Artificial Sequence: Synthetic probe
ctacaggaagaaaagccggtcggtc

SEQ ID NO: 3983 - skipped

SEQ ID NO: 3984 - DNA, 25 bp, Artificial Sequence
  Description of Artificial Sequence: Synthetic probe
ctgcgggagaagtagtatccccagt

SEQ ID NO: 3985 - skipped

SEQ ID NO: 3986 - DNA, 25 bp, Artificial Sequence
  Description of Artificial Sequence: Synthetic probe
acacacacacgtagaattttatccc

SEQ ID NO: 3987 - skipped

SEQ ID NO: 3988 - DNA, 25 bp, Artificial Sequence
  Description of Artificial Sequence: Synthetic probe
gtatatacagtagagatcttgcttc

SEQ ID NO: 3989 - DNA, 25 bp, Artificial Sequence
  Description of Artificial Sequence: Synthetic probe
attacccgtagatgtcgtcccgacg

SEQ ID NO: 3990 - DNA, 25 bp, Artificial Sequence
  Description of Artificial Sequence: Synthetic probe
gtggtcgtctcggaggccctccact

SEQ ID NO: 3991 - DNA, 25 bp, Artificial Sequence
  Description of Artificial Sequence: Synthetic probe
ttctacgtcgggagccaaaggtact

SEQ ID NO: 3992 - DNA, 25 bp, Artificial Sequence
  Description of Artificial Sequence: Synthetic probe
gaggagccggaggaatacacaccgt

SEQ ID NO: 3993 - DNA, 25 bp, Artificial Sequence
  Description of Artificial Sequence: Synthetic probe
acacagacacggagctgaaagacac

SEQ ID NO: 3994 - DNA, 25 bp, Artificial Sequence
  Description of Artificial Sequence: Synthetic probe
tgtgtgtacgaggagagttctcagt

SEQ ID NO: 3995 - DNA, 25 bp, Artificial Sequence
  Description of Artificial Sequence: Synthetic probe
agtgtgtgctgaggttgccctaaca

SEQ ID NO: 3996 - DNA, 25 bp, Artificial Sequence
  Description of Artificial Sequence: Synthetic probe
agcggcgtgtgaggtatcttgaact

SEQ ID NO: 3997 - DNA, 25 bp, Artificial Sequence
  Description of Artificial Sequence: Synthetic probe
ctgtgtgcgtgagaataccggccac

SEQ ID NO: 3998 - DNA, 25 bp, Artificial Sequence
  Description of Artificial Sequence: Synthetic probe
tgtacgccgttgagcgtgtgagtcc

SEQ ID NO: 3999 - DNA, 25 bp, Artificial Sequence
  Description of Artificial Sequence: Synthetic probe
aagttggtgagctgtcgtctttctc

SEQ ID NO: 4000 - DNA, 25 bp, Artificial Sequence
  Description of Artificial Sequence: Synthetic probe
caaggactattcacgcacaccacta

SEQ ID NO: 4001 - DNA, 25 bp, Artificial Sequence
  Description of Artificial Sequence: Synthetic probe
cttggggagtgcgtgagtctaaact

SEQ ID NO: 4002 - DNA, 25 bp, Artificial Sequence
  Description of Artificial Sequence: Synthetic probe
tcgatgcgtgtgagttgattagacc

SEQ ID NO: 4003 - skipped

SEQ ID NO: 4004 - DNA, 25 bp, Artificial Sequence
  Description of Artificial Sequence: Synthetic probe
acctcgacgggagtgtgttgatcac

SEQ ID NO: 4005 - DNA, 25 bp, Artificial Sequence
  Description of Artificial Sequence: Synthetic probe
caccgagtggagtgtgtgcgcacac

SEQ ID NO: 4006 - DNA, 25 bp, Artificial Sequence
  Description of Artificial Sequence: Synthetic probe
cacacacacggagttcctggaccag

SEQ ID NO: 4007 - DNA, 25 bp, Artificial Sequence
  Description of Artificial Sequence: Synthetic probe
acatgagtgtgagtctgaccaacag

SEQ ID NO: 4008 - DNA, 25 bp, Artificial Sequence
  Description of Artificial Sequence: Synthetic probe
aggtgtggtgagtatgtcgatctat

SEQ ID NO: 4009 - DNA, 25 bp, Artificial Sequence
  Description of Artificial Sequence: Synthetic probe
cacctcgagtgagtgtgtcctattg

SEQ ID NO: 4010 - DNA, 25 bp, Artificial Sequence
  Description of Artificial Sequence: Synthetic probe
ggaggacgaggacggggaggacggg

SEQ ID NO: 4011 - DNA, 25 bp, Artificial Sequence
  Description of Artificial Sequence: Synthetic probe
cttagtaggtgagtgtgtctccgac

SEQ ID NO: 4012 - DNA, 25 bp, Artificial Sequence
  Description of Artificial Sequence: Synthetic probe
cctttgagaggatcaccgggacttt

SEQ ID NO: 4013 - DNA, 25 bp, Artificial Sequence
  Description of Artificial Sequence: Synthetic probe
aggtcgacgtccgacgacaacgcga

SEQ ID NO: 4014 - DNA, 25 bp, Artificial Sequence
  Description of Artificial Sequence: Synthetic probe
tgtcgttaccagagtgtgtgcaccc

SEQ ID NO: 4015 - DNA, 25 bp, Artificial Sequence
  Description of Artificial Sequence: Synthetic probe
tctgtgtggagagtacttgtgtaac

SEQ ID NO: 4016 - skipped

SEQ ID NO: 4017 - DNA, 25 bp, Artificial Sequence
  Description of Artificial Sequence: Synthetic probe
cgtcaccgccgaaagagaggaagaa

SEQ ID NO: 4018 - DNA, 25 bp, Artificial Sequence
  Description of Artificial Sequence: Synthetic probe
agtcccgaccgaaacttccttaacg

SEQ ID NO: 4019 - DNA, 25 bp, Artificial Sequence
  Description of Artificial Sequence: Synthetic probe
ctcggacccgaaagagcttgtagtc

SEQ ID NO: 4020 - DNA, 25 bp, Artificial Sequence
  Description of Artificial Sequence: Synthetic probe
aagaacaccgaaaccgatttatctc

SEQ ID NO: 4021 - DNA, 25 bp, Artificial Sequence
  Description of Artificial Sequence: Synthetic probe
cgcggaaccgaacggcccggaatgc

SEQ ID NO: 4022 - DNA, 25 bp, Artificial Sequence
  Description of Artificial Sequence: Synthetic probe
cgacggcccgaacgatgacgaagac

SEQ ID NO: 4023 - DNA, 25 bp, Artificial Sequence
  Description of Artificial Sequence: Synthetic probe
gagccacaccgaacatatagtcaac

SEQ ID NO: 4024 - DNA, 25 bp, Artificial Sequence
  Description of Artificial Sequence: Synthetic probe
cgtctcgtcatcgaaactaatgcat

SEQ ID NO: 4025 - DNA, 25 bp, Artificial Sequence
  Description of Artificial Sequence: Synthetic probe
agacacgacccgatcccgttagagc

SEQ ID NO: 4026 - skipped

SEQ ID NO: 4027 - DNA, 25 bp, Artificial Sequence
  Description of Artificial Sequence: Synthetic probe
gcagacgacgccgatcactcaagtt

SEQ ID NO: 4028 - DNA, 25 bp, Artificial Sequence
  Description of Artificial Sequence: Synthetic probe
gcactgcccgataaaccgtttctgt

SEQ ID NO: 4029 - DNA, 25 bp, Artificial Sequence
  Description of Artificial Sequence: Synthetic probe
aacgacccacgaagacactcgagtc

SEQ ID NO: 4030 - DNA, 25 bp, Artificial Sequence
  Description of Artificial Sequence: Synthetic probe
gtctccgaccacgaatcgaagagtg

SEQ ID NO: 4031 - DNA, 25 bp, Artificial Sequence
  Description of Artificial Sequence: Synthetic probe
gtttcacacacgaatgtctacaggg

SEQ ID NO: 4032 - DNA, 25 bp, Artificial Sequence
  Description of Artificial Sequence: Synthetic probe
caacgacacacgatcgacacacatg

SEQ ID NO: 4033 - DNA, 25 bp, Artificial Sequence
  Description of Artificial Sequence: Synthetic probe
gtgcgacccgacgaaccttatgtac

SEQ ID NO: 4034 - DNA, 25 bp, Artificial Sequence
  Description of Artificial Sequence: Synthetic probe
cgacttccgacgaacaccaaggtgt

SEQ ID NO: 4035 - skipped

SEQ ID NO: 4036 - DNA, 25 bp, Artificial Sequence
  Description of Artificial Sequence: Synthetic probe
atcacacacacgatgagttcgttcg

SEQ ID NO: 4037 - DNA, 25 bp, Artificial Sequence
  Description of Artificial Sequence: Synthetic probe
agtattgttcgagtgtgtacgcgca

SEQ ID NO: 4038 - DNA, 25 bp, Artificial Sequence
  Description of Artificial Sequence: Synthetic probe
tcaccgccgacgatcgagagcctga

SEQ ID NO: 4039 - DNA, 25 bp, Artificial Sequence
  Description of Artificial Sequence: Synthetic probe
acgaacgaacacgatatcgaaaccc

SEQ ID NO: 4040 - DNA, 25 bp, Artificial Sequence
  Description of Artificial Sequence: Synthetic probe
actctacgacacgacgatgggagcc

SEQ ID NO: 4041 - DNA, 25 bp, Artificial Sequence
  Description of Artificial Sequence: Synthetic probe
cccgtacacacgatagacccatgtc

SEQ ID NO: 4042 - DNA, 25 bp, Artificial Sequence
  Description of Artificial Sequence: Synthetic probe
actctgtgtccgagggtgttacctc

SEQ ID NO: 4043 - DNA, 25 bp, Artificial Sequence
  Description of Artificial Sequence: Synthetic probe
cctcgtcgccgagataggaaacggg

SEQ ID NO: 4044 - DNA, 25 bp, Artificial Sequence
  Description of Artificial Sequence: Synthetic probe
gcccgacccgagacgattaatagat

SEQ ID NO: 4045 - DNA, 25 bp, Artificial Sequence
  Description of Artificial Sequence: Synthetic probe
atgtgggtcgaggagagtagccacc

SEQ ID NO: 4046 - DNA, 25 bp, Artificial Sequence
  Description of Artificial Sequence: Synthetic probe
cgacctcactcgagctgtgattggg

SEQ ID NO: 4047 - DNA, 25 bp, Artificial Sequence
  Description of Artificial Sequence: Synthetic probe
acgtccgccgcgagatagccccagt

SEQ ID NO: 4048 - DNA, 25 bp, Artificial Sequence
  Description of Artificial Sequence: Synthetic probe
gtccgaccactcgagaatttctctg

SEQ ID NO: 4049 - DNA, 25 bp, Artificial Sequence
  Description of Artificial Sequence: Synthetic probe
ttgtccgccgagtcttcccaagcgt

SEQ ID NO: 4050 - DNA, 25 bp, Artificial Sequence
  Description of Artificial Sequence: Synthetic probe
cagtgtcccgagtgttctgtacttc

SEQ ID NO: 4051 - DNA, 25 bp, Artificial Sequence
  Description of Artificial Sequence: Synthetic probe
cccaggcgagtgtgtatacgtcttg

SEQ ID NO: 4052 - DNA, 25 bp, Artificial Sequence
  Description of Artificial Sequence: Synthetic probe
atgttctgcgagttgtcccttccga

SEQ ID NO: 4053 - DNA, 25 bp, Artificial Sequence
  Description of Artificial Sequence: Synthetic probe
ctccgccgcgagtcgccatgaagag

SEQ ID NO: 4054 - DNA, 25 bp, Artificial Sequence
  Description of Artificial Sequence: Synthetic probe
ctcgcgtcgtgcgagtggtgacaca

SEQ ID NO: 4055 - DNA, 25 bp, Artificial Sequence
  Description of Artificial Sequence: Synthetic probe
ataaggcacgagtgtgggctacata

SEQ ID NO: 4056 - DNA, 25 bp, Artificial Sequence
  Description of Artificial Sequence: Synthetic probe
actcacacacacgagacagatcaca

SEQ ID NO: 4057 - DNA, 25 bp, Artificial Sequence
  Description of Artificial Sequence: Synthetic probe
ccactccacgagtccatgtatgagg

SEQ ID NO: 4058 - DNA, 25 bp, Artificial Sequence
  Description of Artificial Sequence: Synthetic probe
gtacccgaccacgagtagactcaag

SEQ ID NO: 4059 - DNA, 25 bp, Artificial Sequence
  Description of Artificial Sequence: Synthetic probe
ggtcaccgacacgagatcagtaagt

SEQ ID NO: 4060 - DNA, 25 bp, Artificial Sequence
  Description of Artificial Sequence: Synthetic probe
gtacgcccagacgagtgtgtatacg

SEQ ID NO: 4061 - DNA, 25 bp, Artificial Sequence
  Description of Artificial Sequence: Synthetic probe
gtcctcctcgacgagagcggcaaga

SEQ ID NO: 4062 - DNA, 25 bp, Artificial Sequence
  Description of Artificial Sequence: Synthetic probe
ccgttcgtgtacgagtgtcgtggac

SEQ ID NO: 4063 - DNA, 25 bp, Artificial Sequence
  Description of Artificial Sequence: Synthetic probe
aatgttggacccgtagttctggaag

SEQ ID NO: 4064 - DNA, 25 bp, Artificial Sequence
  Description of Artificial Sequence: Synthetic probe
aaccagggacctcacagggctcgac

SEQ ID NO: 4065 - DNA, 25 bp, Artificial Sequence
  Description of Artificial Sequence: Synthetic probe
ggcccgggacctccagatagacgac

SEQ ID NO: 4066 - DNA, 25 bp, Artificial Sequence
  Description of Artificial Sequence: Synthetic probe
cccagggaccgtcaatggctcgcgg

SEQ ID NO: 4067 - DNA, 25 bp, Artificial Sequence
  Description of Artificial Sequence: Synthetic probe
gtggacaccggaccacaccctaggt

SEQ ID NO: 4068 - skipped

SEQ ID NO: 4069 - DNA, 25 bp, Artificial Sequence
  Description of Artificial Sequence: Synthetic probe
ggtaagagacggaccacgtcgaaag

SEQ ID NO: 4070 - DNA, 25 bp, Artificial Sequence
  Description of Artificial Sequence: Synthetic probe
gtatcggacgggacacctttcgact

SEQ ID NO: 4071 - DNA, 25 bp, Artificial Sequence
  Description of Artificial Sequence: Synthetic probe
cgggcacggacagacacaccttttt

SEQ ID NO: 4072 - DNA, 25 bp, Artificial Sequence
  Description of Artificial Sequence: Synthetic probe
agtccggtggacacacccacgtatg

SEQ ID NO: 4073 - DNA, 25 bp, Artificial Sequence
  Description of Artificial Sequence: Synthetic probe
tctgacacaggacacaccggcacgt

SEQ ID NO: 4074 - DNA, 25 bp, Artificial Sequence
  Description of Artificial Sequence: Synthetic probe
ttccgacgtaggacacacggaggtc

SEQ ID NO: 4075 - DNA, 25 bp, Artificial Sequence
  Description of Artificial Sequence: Synthetic probe
gcgcggaccggacacacgactcaaa

SEQ ID NO: 4076 - DNA, 25 bp, Artificial Sequence
  Description of Artificial Sequence: Synthetic probe
tgtcaaatgaccagtccaccggggt

SEQ ID NO: 4077 - DNA, 25 bp, Artificial Sequence
  Description of Artificial Sequence: Synthetic probe
catcaccggacacggatatcggagt

SEQ ID NO: 4078 - DNA, 25 bp, Artificial Sequence
  Description of Artificial Sequence: Synthetic probe
gtcgccatctgacctgtttaccgtg

SEQ ID NO: 4079 - DNA, 25 bp, Artificial Sequence
  Description of Artificial Sequence: Synthetic probe
gtcctggtgtgacactcctggtggt

SEQ ID NO: 4080 - DNA, 25 bp, Artificial Sequence
  Description of Artificial Sequence: Synthetic probe
ggtctcccggactagggacgtcaaa

SEQ ID NO: 4081 - DNA, 25 bp, Artificial Sequence
  Description of Artificial Sequence: Synthetic probe
ggagacccggactcatttggtacac

SEQ ID NO: 4082 - DNA, 25 bp, Artificial Sequence
  Description of Artificial Sequence: Synthetic probe
acgtccgacctgacttatgaaacga

SEQ ID NO: 4083 - DNA, 25 bp, Artificial Sequence
  Description of Artificial Sequence: Synthetic probe
atggtgtgtgactttgtatgttatg

SEQ ID NO: 4084 - DNA, 25 bp, Artificial Sequence
  Description of Artificial Sequence: Synthetic probe
ggaagacactgacttcgtgtgtgtg

SEQ ID NO: 4085 - DNA, 25 bp, Artificial Sequence
  Description of Artificial Sequence: Synthetic probe
aaaggtctgactcgtacgtgcgtgc

SEQ ID NO: 4086 - DNA, 25 bp, Artificial Sequence
  Description of Artificial Sequence: Synthetic probe
cgataagttagaccggttttgccac

SEQ ID NO: 4087 - DNA, 25 bp, Artificial Sequence
  Description of Artificial Sequence: Synthetic probe
gtgaacgaacagaccgcactgccca

SEQ ID NO: 4088 - DNA, 25 bp, Artificial Sequence
  Description of Artificial Sequence: Synthetic probe
atctaccacagaccacgtttcgttt

SEQ ID NO: 4089 - DNA, 25 bp, Artificial Sequence
  Description of Artificial Sequence: Synthetic probe
cttcgggagacctagacacttgggc

SEQ ID NO: 4090 - DNA, 25 bp, Artificial Sequence
  Description of Artificial Sequence: Synthetic probe
attctaccgagaccgggacacacct

SEQ ID NO: 4091 - DNA, 25 bp, Artificial Sequence
  Description of Artificial Sequence: Synthetic probe
cacacgcacagacacgcgagggcgg

SEQ ID NO: 4092 - DNA, 25 bp, Artificial Sequence
  Description of Artificial Sequence: Synthetic probe
tcacacacagagacagtcagactag

SEQ ID NO: 4093 - DNA, 25 bp, Artificial Sequence
  Description of Artificial Sequence: Synthetic probe
ccgtcaccagacacgggcacggtta

SEQ ID NO: 4094 - DNA, 25 bp, Artificial Sequence
  Description of Artificial Sequence: Synthetic probe
acgacatactgagacacacacacag

SEQ ID NO: 4095 - DNA, 25 bp, Artificial Sequence
  Description of Artificial Sequence: Synthetic probe
ttaagatagagacacgacaccgacg

SEQ ID NO: 4096 - DNA, 25 bp, Artificial Sequence
  Description of Artificial Sequence: Synthetic probe
gtacgtaccacggagacacacacca

SEQ ID NO: 4097 - DNA, 25 bp, Artificial Sequence
  Description of Artificial Sequence: Synthetic probe
actccacactagacaatgacttccg

SEQ ID NO: 4098 - DNA, 25 bp, Artificial Sequence
  Description of Artificial Sequence: Synthetic probe
agaggcatagacacacacacttcga

SEQ ID NO: 4099 - DNA, 25 bp, Artificial Sequence
  Description of Artificial Sequence: Synthetic probe
tccgaggtcggacgccgtcgtgtta

SEQ ID NO: 4100 - DNA, 25 bp, Artificial Sequence
  Description of Artificial Sequence: Synthetic probe
accagacacggacgcgagtcgccac

SEQ ID NO: 4101 - skipped

SEQ ID NO: 4102 - DNA, 25 bp, Artificial Sequence
  Description of Artificial Sequence: Synthetic probe
gtctgttatggacgaggtccgtaca

SEQ ID NO: 4103 - DNA, 25 bp, Artificial Sequence
  Description of Artificial Sequence: Synthetic probe
aggaccaggacgaccacgtagaacg

SEQ ID NO: 4104 - DNA, 25 bp, Artificial Sequence
  Description of Artificial Sequence: Synthetic probe
aagctgtgtgacgtgtcgaagccct

SEQ ID NO: 4105 - DNA, 25 bp, Artificial Sequence
  Description of Artificial Sequence: Synthetic probe
ctgaagggacgttgttgtcgttacc

SEQ ID NO: 4106 - DNA, 25 bp, Artificial Sequence
  Description of Artificial Sequence: Synthetic probe
gaagctgtgtgacgtgtcgaagccc

SEQ ID NO: 4107 - DNA, 25 bp, Artificial Sequence
  Description of Artificial Sequence: Synthetic probe
ctttttgacgtatgtgtgtatgcac

SEQ ID NO: 4108 - DNA, 25 bp, Artificial Sequence
  Description of Artificial Sequence: Synthetic probe
atcccaagacggtctttacagttag

SEQ ID NO: 4109 - DNA, 25 bp, Artificial Sequence
  Description of Artificial Sequence: Synthetic probe
acactcgtccagacgcacttgaggg

SEQ ID NO: 4110 - DNA, 25 bp, Artificial Sequence
  Description of Artificial Sequence: Synthetic probe
ttatcttccgaccacgcgaacccgg

SEQ ID NO: 4111 - DNA, 25 bp, Artificial Sequence
  Description of Artificial Sequence: Synthetic probe
ctttactgcgaccacgacatgcggc

SEQ ID NO: 4112 - DNA, 25 bp, Artificial Sequence
  Description of Artificial Sequence: Synthetic probe
ggggacctcgacacaaatccagatt

SEQ ID NO: 4113 - DNA, 25 bp, Artificial Sequence
  Description of Artificial Sequence: Synthetic probe
tgtcgaaccacgacccatgtggtcc

SEQ ID NO: 4114 - DNA, 25 bp, Artificial Sequence
  Description of Artificial Sequence: Synthetic probe
ctaccaccgcgacccaaatagggga

SEQ ID NO: 4115 - DNA, 25 bp, Artificial Sequence
  Description of Artificial Sequence: Synthetic probe
cgactcctccgaccgtataacgttg

SEQ ID NO: 4116 - DNA, 25 bp, Artificial Sequence
  Description of Artificial Sequence: Synthetic probe
ggtaaccaccgacaaatccgtccgt

SEQ ID NO: 4117 - DNA, 25 bp, Artificial Sequence
  Description of Artificial Sequence: Synthetic probe
ttgtggccgacaccgcgacgaaatg

SEQ ID NO: 4118 - DNA, 25 bp, Artificial Sequence
  Description of Artificial Sequence: Synthetic probe
agaccacgtccgacccactggaagg

SEQ ID NO: 4119 - DNA, 25 bp, Artificial Sequence
  Description of Artificial Sequence: Synthetic probe
agttaccaccgaccactataaccta

SEQ ID NO: 4120 - DNA, 25 bp, Artificial Sequence
  Description of Artificial Sequence: Synthetic probe
gcccgtcccgacatccgtagttaga

SEQ ID NO: 4121 - DNA, 25 bp, Artificial Sequence
  Description of Artificial Sequence: Synthetic probe
cttatcccgaccacgtgtccaaggg

SEQ ID NO: 4122 - DNA, 25 bp, Artificial Sequence
  Description of Artificial Sequence: Synthetic probe
agtcacgcaccgacatgtcttatcc

SEQ ID NO: 4123 - DNA, 25 bp, Artificial Sequence
  Description of Artificial Sequence: Synthetic probe
ggacgccaccgacctctttgtaaga

SEQ ID NO: 4124 - DNA, 25 bp, Artificial Sequence
  Description of Artificial Sequence: Synthetic probe
ttgtcaaccgacaacgacccacggg

SEQ ID NO: 4125 - DNA, 25 bp, Artificial Sequence
  Description of Artificial Sequence: Synthetic probe
atcccaccgaccacgagcatagatg

SEQ ID NO: 4126 - DNA, 25 bp, Artificial Sequence
  Description of Artificial Sequence: Synthetic probe
ctgtgtgccgacaacgaacgaccga

SEQ ID NO: 4127 - DNA, 25 bp, Artificial Sequence
  Description of Artificial Sequence: Synthetic probe
aggacgacaccgacctttagctcga

SEQ ID NO: 4128 - DNA, 25 bp, Artificial Sequence
  Description of Artificial Sequence: Synthetic probe
gttgggtaccgacacacccgacgtg

SEQ ID NO: 4129 - DNA, 25 bp, Artificial Sequence
  Description of Artificial Sequence: Synthetic probe
gtttgactccgacaccgattcacgt

SEQ ID NO: 4130 - DNA, 25 bp, Artificial Sequence
  Description of Artificial Sequence: Synthetic probe
agaaccaccgacacttggagaggta

SEQ ID NO: 4131 - DNA, 25 bp, Artificial Sequence
  Description of Artificial Sequence: Synthetic probe
gggtcaccgcgaccgcaaagcgcga

SEQ ID NO: 4132 - DNA, 25 bp, Artificial Sequence
  Description of Artificial Sequence: Synthetic probe
acagcatatcgacaccgccgaaggg

SEQ ID NO: 4133 - DNA, 25 bp, Artificial Sequence
  Description of Artificial Sequence: Synthetic probe
tctcacgacgccgacacgggagagg

SEQ ID NO: 4134 - DNA, 25 bp, Artificial Sequence
  Description of Artificial Sequence: Synthetic probe
aattctagtcgaccagttgtgccac

SEQ ID NO: 4135 - DNA, 25 bp, Artificial Sequence
  Description of Artificial Sequence: Synthetic probe
ccgcgacgccgactttaagggtatc

SEQ ID NO: 4136 - DNA, 25 bp, Artificial Sequence
  Description of Artificial Sequence: Synthetic probe
cgacacacgatcgacacacatgcga

SEQ ID NO: 4137 - DNA, 25 bp, Artificial Sequence
  Description of Artificial Sequence: Synthetic probe
ctcgggcgtcgacaacagggccaca

SEQ ID NO: 4138 - DNA, 25 bp, Artificial Sequence
  Description of Artificial Sequence: Synthetic probe
ctggacaccgactcaccaagggaaa

SEQ ID NO: 4139 - DNA, 25 bp, Artificial Sequence
  Description of Artificial Sequence: Synthetic probe
atcctccgacgactagtccgacaag

SEQ ID NO: 4140 - DNA, 25 bp, Artificial Sequence
  Description of Artificial Sequence: Synthetic probe
gtcacctatccgactgtataacaag

SEQ ID NO: 4141 - DNA, 25 bp, Artificial Sequence
  Description of Artificial Sequence: Synthetic probe
acatcgtgtgcgacttgctaccggg

SEQ ID NO: 4142 - DNA, 25 bp, Artificial Sequence
  Description of Artificial Sequence: Synthetic probe
ctgcgtgtgcgactctctccatctt

SEQ ID NO: 4143 - DNA, 25 bp, Artificial Sequence
  Description of Artificial Sequence: Synthetic probe
gacacctaccacgaccgtaaattct

SEQ ID NO: 4144 - DNA, 25 bp, Artificial Sequence
  Description of Artificial Sequence: Synthetic probe
ggtggtggtcgactactaagagaag

SEQ ID NO: 4145 - DNA, 25 bp, Artificial Sequence
  Description of Artificial Sequence: Synthetic probe
gggaccaacgacccacgtttcacga

SEQ ID NO: 4146 - skipped

SEQ ID NO: 4147 - DNA, 25 bp, Artificial Sequence
  Description of Artificial Sequence: Synthetic probe
gtttcgaccacgacaccaacgtctt

SEQ ID NO: 4148 - DNA, 25 bp, Artificial Sequence
  Description of Artificial Sequence: Synthetic probe
ctcactccacgaccctcttgggacg

SEQ ID NO: 4149 - DNA, 25 bp, Artificial Sequence
  Description of Artificial Sequence: Synthetic probe
cgtgcgtggcgacggcagtatgcgc

SEQ ID NO: 4150 - skipped

SEQ ID NO: 4151 - DNA, 25 bp, Artificial Sequence
  Description of Artificial Sequence: Synthetic probe
ccctagacgacgaccggagtacttg

SEQ ID NO: 4152 - DNA, 25 bp, Artificial Sequence
  Description of Artificial Sequence: Synthetic probe
cgacgtcccacgacatcaaattcag

SEQ ID NO: 4153 - DNA, 25 bp, Artificial Sequence
  Description of Artificial Sequence: Synthetic probe
gtagatgacaccgacgccactcttt

SEQ ID NO: 4154 - DNA, 25 bp, Artificial Sequence
  Description of Artificial Sequence: Synthetic probe
gctccgccacgacgaaccttatagt

SEQ ID NO: 4155 - DNA, 25 bp, Artificial Sequence
  Description of Artificial Sequence: Synthetic probe
ggacacacaacgacttatccggagt

SEQ ID NO: 4156 - DNA, 25 bp, Artificial Sequence
  Description of Artificial Sequence: Synthetic probe
gtcaactccgacgaccctatcgagt

SEQ ID NO: 4157 - DNA, 25 bp, Artificial Sequence
  Description of Artificial Sequence: Synthetic probe
ctacttttacgacggcacgacattc

SEQ ID NO: 4158 - DNA, 25 bp, Artificial Sequence
  Description of Artificial Sequence: Synthetic probe
cgtgactccgacgacaggttacgac

SEQ ID NO: 4159 - DNA, 25 bp, Artificial Sequence
  Description of Artificial Sequence: Synthetic probe
acacgcctccgacggccagctacga

SEQ ID NO: 4160 - DNA, 25 bp, Artificial Sequence
  Description of Artificial Sequence: Synthetic probe
ctaccgccacgacggtttgtagtac

SEQ ID NO: 4161 - DNA, 25 bp, Artificial Sequence
  Description of Artificial Sequence: Synthetic probe
catacactcgtacgacacatatgtg

SEQ ID NO: 4162 - DNA, 25 bp, Artificial Sequence
  Description of Artificial Sequence: Synthetic probe
ccatggtacgacgtgggtgttgaac

SEQ ID NO: 4163 - DNA, 25 bp, Artificial Sequence
  Description of Artificial Sequence: Synthetic probe
gcgacgttcccgacgacgtcctagt

SEQ ID NO: 4164 - skipped

SEQ ID NO: 4165 - DNA, 25 bp, Artificial Sequence
  Description of Artificial Sequence: Synthetic probe
actagccaccgacgattcgaggaat

SEQ ID NO: 4166 - DNA, 25 bp, Artificial Sequence
  Description of Artificial Sequence: Synthetic probe
aggcctccgacgacattagcgcgtc

SEQ ID NO: 4167 - DNA, 25 bp, Artificial Sequence
  Description of Artificial Sequence: Synthetic probe
acgccaaccgacgagtcacctttag

SEQ ID NO: 4168 - DNA, 25 bp, Artificial Sequence
  Description of Artificial Sequence: Synthetic probe
ctcaacagcgacgacgagaacgagg

SEQ ID NO: 4169 - DNA, 25 bp, Artificial Sequence
  Description of Artificial Sequence: Synthetic probe
gtcccgtcaccgacgacgtccttgg

SEQ ID NO: 4170 - DNA, 25 bp, Artificial Sequence
  Description of Artificial Sequence: Synthetic probe
gtactagccaccgacgattcgagga

SEQ ID NO: 4171 - DNA, 25 bp, Artificial Sequence
  Description of Artificial Sequence: Synthetic probe
atcgaacgccgacgtagctacgtta

SEQ ID NO: 4172 - DNA, 25 bp, Artificial Sequence
  Description of Artificial Sequence: Synthetic probe
gttccagaccgttccatcccaagca

SEQ ID NO: 4173 - skipped

SEQ ID NO: 4174 - DNA, 25 bp, Artificial Sequence
  Description of Artificial Sequence: Synthetic probe
gaaaaatttttcacgcacacaccga

SEQ ID NO: 4175 - DNA, 25 bp, Artificial Sequence
  Description of Artificial Sequence: Synthetic probe
atttgtttttgtgtcggtctattaa

SEQ ID NO: 4176 - DNA, 25 bp, Artificial Sequence
  Description of Artificial Sequence: Synthetic probe
atccaatttttgtggttgtgtgtgt

SEQ ID NO: 4177 - DNA, 25 bp, Artificial Sequence
  Description of Artificial Sequence: Synthetic probe
gtttcggttttggtggtaatcagac

SEQ ID NO: 4178 - DNA, 25 bp, Artificial Sequence
  Description of Artificial Sequence: Synthetic probe
tcggtgtttttgttccgtgttccac

SEQ ID NO: 4179 - DNA, 25 bp, Artificial Sequence
  Description of Artificial Sequence: Synthetic probe
taagacagatttggtgtgttccctc

SEQ ID NO: 4180 - DNA, 25 bp, Artificial Sequence
  Description of Artificial Sequence: Synthetic probe
gttcaacatttgtggtggtgtgagt

SEQ ID NO: 4181 - DNA, 25 bp, Artificial Sequence
  Description of Artificial Sequence: Synthetic probe
accaacatttgtggtgtgacgtgaa

SEQ ID NO: 4182 - DNA, 25 bp, Artificial Sequence
  Description of Artificial Sequence: Synthetic probe
ataatctatttgtgtgtggtcgagg

SEQ ID NO: 4183 - DNA, 25 bp, Artificial Sequence
  Description of Artificial Sequence: Synthetic probe
cttttcttttgtagtataccggcgg

SEQ ID NO: 4184 - DNA, 25 bp, Artificial Sequence
  Description of Artificial Sequence: Synthetic probe
agaatagtctttgtgtgaagtaaga

SEQ ID NO: 4185 - DNA, 25 bp, Artificial Sequence
  Description of Artificial Sequence: Synthetic probe
gttttctctttgtccgtggagaagt

SEQ ID NO: 4186 - DNA, 25 bp, Artificial Sequence
  Description of Artificial Sequence: Synthetic probe
cctagacatttctgcggtggtgtga

SEQ ID NO: 4187 - DNA, 25 bp, Artificial Sequence
  Description of Artificial Sequence: Synthetic probe
gtgtgtgcgattatcgccgaattgg

SEQ ID NO: 4188 - DNA, 25 bp, Artificial Sequence
  Description of Artificial Sequence: Synthetic probe
agaactatctttcatcggtaagagg

SEQ ID NO: 4189 - DNA, 25 bp, Artificial Sequence
  Description of Artificial Sequence: Synthetic probe
tgtgtgtgctttctgttcaccgtcg

SEQ ID NO: 4190 - DNA, 25 bp, Artificial Sequence
  Description of Artificial Sequence: Synthetic probe
acatgaggtttttgtgtggtccgac

SEQ ID NO: 4191 - DNA, 25 bp, Artificial Sequence
  Description of Artificial Sequence: Synthetic probe
ggtcccggtttgtgtcctcgggtta

SEQ ID NO: 4192 - DNA, 25 bp, Artificial Sequence
  Description of Artificial Sequence: Synthetic probe
acaattgtttgctgtcggtgactcc

SEQ ID NO: 4193 - DNA, 25 bp, Artificial Sequence
  Description of Artificial Sequence: Synthetic probe
cgtctcgctcgtttgtgaaaccacg

SEQ ID NO: 4194 - DNA, 25 bp, Artificial Sequence
  Description of Artificial Sequence: Synthetic probe
gaatccgtgtttgtggtttagtacg

SEQ ID NO: 4195 - DNA, 25 bp, Artificial Sequence
  Description of Artificial Sequence: Synthetic probe
gtgtggtgtgtttgtcgtgtgtggt

SEQ ID NO: 4196 - DNA, 25 bp, Artificial Sequence
  Description of Artificial Sequence: Synthetic probe
agtaactacggtttgtcgtggtgga

SEQ ID NO: 4197 - DNA, 25 bp, Artificial Sequence
  Description of Artificial Sequence: Synthetic probe
taatctcagtttgtgtgtgccggcc

SEQ ID NO: 4198 - DNA, 25 bp, Artificial Sequence
  Description of Artificial Sequence: Synthetic probe
aaaacggtttgtgttggagagcctc

SEQ ID NO: 4199 - DNA, 25 bp, Artificial Sequence
  Description of Artificial Sequence: Synthetic probe
aatggagtttgactgtctttagtac

SEQ ID NO: 4200 - DNA, 25 bp, Artificial Sequence
  Description of Artificial Sequence: Synthetic probe
actcagtaagtttgtggtccttctt

SEQ ID NO: 4201 - DNA, 25 bp, Artificial Sequence
  Description of Artificial Sequence: Synthetic probe
cctatcgcgtttgtggtggcgcctg

SEQ ID NO: 4202 - DNA, 25 bp, Artificial Sequence
  Description of Artificial Sequence: Synthetic probe
gtgcggtgtgtttctacaataaatg

SEQ ID NO: 4203 - DNA, 25 bp, Artificial Sequence
  Description of Artificial Sequence: Synthetic probe
acaacgtgtgtttctgttaatcact

SEQ ID NO: 4204 - DNA, 25 bp, Artificial Sequence
  Description of Artificial Sequence: Synthetic probe
ggtggtcggtttctctgattacgtt

SEQ ID NO: 4205 - DNA, 25 bp, Artificial Sequence
  Description of Artificial Sequence: Synthetic probe
cgtcgaggagtttcagtctgtgctt

SEQ ID NO: 4206 - DNA, 25 bp, Artificial Sequence
  Description of Artificial Sequence: Synthetic probe
gcgtgccgtgtttctgctacctgtg

SEQ ID NO: 4207 - DNA, 25 bp, Artificial Sequence
  Description of Artificial Sequence: Synthetic probe
gtttgtgtcgtttccttcaacgttg

SEQ ID NO: 4208 - DNA, 25 bp, Artificial Sequence
  Description of Artificial Sequence: Synthetic probe
tcttcattttatgtttgtgtgggta

SEQ ID NO: 4209 - DNA, 25 bp, Artificial Sequence
  Description of Artificial Sequence: Synthetic probe
aatgtttttatgtgtggtcgtcgtc

SEQ ID NO: 4210 - DNA, 25 bp, Artificial Sequence
  Description of Artificial Sequence: Synthetic probe
acaatgttttagtgtgggtgactcg

SEQ ID NO: 4211 - DNA, 25 bp, Artificial Sequence
  Description of Artificial Sequence: Synthetic probe
ctatccgttttagtgtgtgcgtccc

SEQ ID NO: 4212 - DNA, 25 bp, Artificial Sequence
  Description of Artificial Sequence: Synthetic probe
ctcttacatttacgtgtgtgagtgt

SEQ ID NO: 4213 - DNA, 25 bp, Artificial Sequence
  Description of Artificial Sequence: Synthetic probe
agcaatgtttacgtggcttgtcgag

SEQ ID NO: 4214 - DNA, 25 bp, Artificial Sequence
  Description of Artificial Sequence: Synthetic probe
atcccgtaatttcctggaggcgtct

SEQ ID NO: 4215 - DNA, 25 bp, Artificial Sequence
  Description of Artificial Sequence: Synthetic probe
caggtaaattggtcgtgttctcggg

SEQ ID NO: 4216 - DNA, 25 bp, Artificial Sequence
  Description of Artificial Sequence: Synthetic probe
acacgtacacacatttctactctag

SEQ ID NO: 4217 - DNA, 25 bp, Artificial Sequence
  Description of Artificial Sequence: Synthetic probe
aggaaaattctctgtcgtccttttc

SEQ ID NO: 4218 - DNA, 25 bp, Artificial Sequence
  Description of Artificial Sequence: Synthetic probe
aatcaagatttgtggtgatgtgaac

SEQ ID NO: 4219 - DNA, 25 bp, Artificial Sequence
  Description of Artificial Sequence: Synthetic probe
agtgtgtgtgatttaacgtaactcc

SEQ ID NO: 4220 - DNA, 25 bp, Artificial Sequence
  Description of Artificial Sequence: Synthetic probe
gtccgttgcgattgtgtcctaccct

SEQ ID NO: 4221 - DNA, 25 bp, Artificial Sequence
  Description of Artificial Sequence: Synthetic probe
gtgaagctagattgttgttgagatc

SEQ ID NO: 4222 - DNA, 25 bp, Artificial Sequence
  Description of Artificial Sequence: Synthetic probe
atgtttgattctgtgttggtgcgtg

SEQ ID NO: 4223 - DNA, 25 bp, Artificial Sequence
  Description of Artificial Sequence: Synthetic probe
agtctacccattacacgggtgcacc

SEQ ID NO: 4224 - DNA, 25 bp, Artificial Sequence
  Description of Artificial Sequence: Synthetic probe
attacgacgacattagacaacgaag

SEQ ID NO: 4225 - DNA, 25 bp, Artificial Sequence
  Description of Artificial Sequence: Synthetic probe
acgttgcttattcggtgtgtgtccc

SEQ ID NO: 4226 - DNA, 25 bp, Artificial Sequence
  Description of Artificial Sequence: Synthetic probe
ataaattattccgttggtgtgtgaa

SEQ ID NO: 4227 - DNA, 25 bp, Artificial Sequence
  Description of Artificial Sequence: Synthetic probe
ccctacggtattgacgtttcaagag

SEQ ID NO: 4228 - DNA, 25 bp, Artificial Sequence
  Description of Artificial Sequence: Synthetic probe
aaggttttgggtgtggttaagtctc

SEQ ID NO: 4229 - DNA, 25 bp, Artificial Sequence
  Description of Artificial Sequence: Synthetic probe
tactgtttttggtgtttatggaaac

SEQ ID NO: 4230 - DNA, 25 bp, Artificial Sequence
  Description of Artificial Sequence: Synthetic probe
aaacatttggtggtggtgtaatcga

SEQ ID NO: 4231 - DNA, 25 bp, Artificial Sequence
  Description of Artificial Sequence: Synthetic probe
tagtgcgtgcttggttgtccgttcc

SEQ ID NO: 4232 - DNA, 25 bp, Artificial Sequence
  Description of Artificial Sequence: Synthetic probe
ctcagcgtcttggtcttcttccggt

SEQ ID NO: 4233 - DNA, 25 bp, Artificial Sequence
  Description of Artificial Sequence: Synthetic probe
gtagccctttgcacgcacacactgt

SEQ ID NO: 4234 - DNA, 25 bp, Artificial Sequence
  Description of Artificial Sequence: Synthetic probe
acgtgtgtgtcttggtgtgttgatt

SEQ ID NO: 4235 - DNA, 25 bp, Artificial Sequence
  Description of Artificial Sequence: Synthetic probe
gacggtggtcgttggtttttcttcg

SEQ ID NO: 4236 - DNA, 25 bp, Artificial Sequence
  Description of Artificial Sequence: Synthetic probe
acttctggttgggtagttcctgtgt

SEQ ID NO: 4237 - DNA, 25 bp, Artificial Sequence
  Description of Artificial Sequence: Synthetic probe
ctaacggcgttggttgtgtatccct

SEQ ID NO: 4238 - DNA, 25 bp, Artificial Sequence
  Description of Artificial Sequence: Synthetic probe
cttactactcttgcgtgtctggtct

SEQ ID NO: 4239 - DNA, 25 bp, Artificial Sequence
  Description of Artificial Sequence: Synthetic probe
cgcttcggttggtgtgtgagaactt

SEQ ID NO: 4240 - DNA, 25 bp, Artificial Sequence
  Description of Artificial Sequence: Synthetic probe
gtaagttgcgttggacagtgtctct

SEQ ID NO: 4241 - DNA, 25 bp, Artificial Sequence
  Description of Artificial Sequence: Synthetic probe
acggtgtctgttggtcccgaagcag

SEQ ID NO: 4242 - DNA, 25 bp, Artificial Sequence
  Description of Artificial Sequence: Synthetic probe
acgagagttgttggtcggcgaactc

SEQ ID NO: 4243 - DNA, 25 bp, Artificial Sequence
  Description of Artificial Sequence: Synthetic probe
agttactaacgttgggtgtggaaga

SEQ ID NO: 4244 - DNA, 25 bp, Artificial Sequence
  Description of Artificial Sequence: Synthetic probe
cccttttgatctttcggacgacctg

SEQ ID NO: 4245 - skipped

SEQ ID NO: 4246 - DNA, 25 bp, Artificial Sequence
  Description of Artificial Sequence: Synthetic probe
agcgtgcgtttgacaaagaactcag

SEQ ID NO: 4247 - DNA, 25 bp, Artificial Sequence
  Description of Artificial Sequence: Synthetic probe
agaccctttgactacggtgatcgga

SEQ ID NO: 4248 - DNA, 25 bp, Artificial Sequence
  Description of Artificial Sequence: Synthetic probe
ctctttttgacggtggtcccggtgc

SEQ ID NO: 4249 - DNA, 25 bp, Artificial Sequence
  Description of Artificial Sequence: Synthetic probe
gtgtggtactttgtgtggtcattcc

SEQ ID NO: 4250 - DNA, 25 bp, Artificial Sequence
  Description of Artificial Sequence: Synthetic probe
atgtctgtttgtgggtcaaacggac

SEQ ID NO: 4251 - DNA, 25 bp, Artificial Sequence
  Description of Artificial Sequence: Synthetic probe
cccagtttgtgcgtgtgaacgaacc

SEQ ID NO: 4252 - DNA, 25 bp, Artificial Sequence
  Description of Artificial Sequence: Synthetic probe
atatgtgtttgtgacgccccctctt

SEQ ID NO: 4253 - DNA, 25 bp, Artificial Sequence
  Description of Artificial Sequence: Synthetic probe
cagcctttgtgtcgttgggtactcc

SEQ ID NO: 4254 - DNA, 25 bp, Artificial Sequence
  Description of Artificial Sequence: Synthetic probe
tttctgtttgtgttgttcctctccg

SEQ ID NO: 4255 - DNA, 25 bp, Artificial Sequence
  Description of Artificial Sequence: Synthetic probe
cctgtgtttgtgaagccttccggcg

SEQ ID NO: 4256 - DNA, 25 bp, Artificial Sequence
  Description of Artificial Sequence: Synthetic probe
ccgtggattgtggtcggttgttaaa

SEQ ID NO: 4257 - DNA, 25 bp, Artificial Sequence
  Description of Artificial Sequence: Synthetic probe
gttacggtctttgtgtccgttgtga

SEQ ID NO: 4258 - DNA, 25 bp, Artificial Sequence
  Description of Artificial Sequence: Synthetic probe
agtcgtcaacttgtcaatttaagta

SEQ ID NO: 4259 - DNA, 25 bp, Artificial Sequence
  Description of Artificial Sequence: Synthetic probe
agatatctcttgtggtgtacctggt

SEQ ID NO: 4260 - DNA, 25 bp, Artificial Sequence
  Description of Artificial Sequence: Synthetic probe
atacttgcttgtttgtgtgtgccca

SEQ ID NO: 4261 - DNA, 25 bp, Artificial Sequence
  Description of Artificial Sequence: Synthetic probe
cgcgagttgttgtttagggtcagat

SEQ ID NO: 4262 - DNA, 25 bp, Artificial Sequence
  Description of Artificial Sequence: Synthetic probe
cgtttaccttgtgtggtgcctcctc

SEQ ID NO: 4263 - DNA, 25 bp, Artificial Sequence
  Description of Artificial Sequence: Synthetic probe
gtagtccacgattgtgtgtgtgtgt

SEQ ID NO: 4264 - DNA, 25 bp, Artificial Sequence
  Description of Artificial Sequence: Synthetic probe
tcaaggtcttgttgtggatatttcc

SEQ ID NO: 4265 - DNA, 25 bp, Artificial Sequence
  Description of Artificial Sequence: Synthetic probe
ctatgtgtcttgtggttcttgtgat

SEQ ID NO: 4266 - DNA, 25 bp, Artificial Sequence
  Description of Artificial Sequence: Synthetic probe
cttttacgttgttgttcccaggtag

SEQ ID NO: 4267 - DNA, 25 bp, Artificial Sequence
  Description of Artificial Sequence: Synthetic probe
atctcccttgtgtgttacgagagaa

SEQ ID NO: 4268 - DNA, 25 bp, Artificial Sequence
  Description of Artificial Sequence: Synthetic probe
aagattcttgtgttcgtgtggcctc

SEQ ID NO: 4269 - DNA, 25 bp, Artificial Sequence
  Description of Artificial Sequence: Synthetic probe
ctactgacgtcttgtggtcctctac

SEQ ID NO: 4270 - DNA, 25 bp, Artificial Sequence
  Description of Artificial Sequence: Synthetic probe
agtgtatactcttgtgtgtgtctgt

SEQ ID NO: 4271 - DNA, 25 bp, Artificial Sequence
  Description of Artificial Sequence: Synthetic probe
cgaataacttgtccgtgtggggcaa

SEQ ID NO: 4272 - DNA, 25 bp, Artificial Sequence
  Description of Artificial Sequence: Synthetic probe
aagtggcgttgtgtcgtcttccgtc

SEQ ID NO: 4273 - DNA, 25 bp, Artificial Sequence
  Description of Artificial Sequence: Synthetic probe
attcgttcgttgtgtattgtttgga

SEQ ID NO: 4274 - DNA, 25 bp, Artificial Sequence
  Description of Artificial Sequence: Synthetic probe
agtcttggttgttgtgtttatttca

SEQ ID NO: 4275 - DNA, 25 bp, Artificial Sequence
  Description of Artificial Sequence: Synthetic probe
tggtgtgtttgtcgtgtgtggtgta

SEQ ID NO: 4276 - DNA, 25 bp, Artificial Sequence
  Description of Artificial Sequence: Synthetic probe
aaacgtcgtgttgtggtaacgggcc

SEQ ID NO: 4277 - DNA, 25 bp, Artificial Sequence
  Description of Artificial Sequence: Synthetic probe
tgttgctgttgttgtcctcgcgaac

SEQ ID NO: 4278 - DNA, 25 bp, Artificial Sequence
  Description of Artificial Sequence: Synthetic probe
cttgggttgtggtatcgttcttatc

SEQ ID NO: 4279 - DNA, 25 bp, Artificial Sequence
  Description of Artificial Sequence: Synthetic probe
atcagttcttgtctggtgtgtccac

SEQ ID NO: 4280 - DNA, 25 bp, Artificial Sequence
  Description of Artificial Sequence: Synthetic probe
gtatcactggttgtgtggccaagct

SEQ ID NO: 4281 - DNA, 25 bp, Artificial Sequence
  Description of Artificial Sequence: Synthetic probe
cccgacggttgtggtctttcgggtc

SEQ ID NO: 4282 - DNA, 25 bp, Artificial Sequence
  Description of Artificial Sequence: Synthetic probe
acaaatgttgtgtgggttgtccttc

SEQ ID NO: 4283 - DNA, 25 bp, Artificial Sequence
  Description of Artificial Sequence: Synthetic probe
atcgtttcgttgtggttgtcgaccg

SEQ ID NO: 4284 - DNA, 25 bp, Artificial Sequence
  Description of Artificial Sequence: Synthetic probe
atcctggttgtggttatggtggctc

SEQ ID NO: 4285 - DNA, 25 bp, Artificial Sequence
  Description of Artificial Sequence: Synthetic probe
actccgttgttgttgagtgagaccc

SEQ ID NO: 4286 - DNA, 25 bp, Artificial Sequence
  Description of Artificial Sequence: Synthetic probe
actgtgggttgtcatcgggactcga

SEQ ID NO: 4287 - DNA, 25 bp, Artificial Sequence
  Description of Artificial Sequence: Synthetic probe
cgccgccgttgttctcgtctcttga

SEQ ID NO: 4288 - DNA, 25 bp, Artificial Sequence
  Description of Artificial Sequence: Synthetic probe
ccataccgttgtgtgtggataccag

SEQ ID NO: 4289 - DNA, 25 bp, Artificial Sequence
  Description of Artificial Sequence: Synthetic probe
tccacgcacatggactaagtcaggc

SEQ ID NO: 4290 - DNA, 25 bp, Artificial Sequence
  Description of Artificial Sequence: Synthetic probe
atcaaccgatggtggtgtatgacga

SEQ ID NO: 4291 - DNA, 25 bp, Artificial Sequence
  Description of Artificial Sequence: Synthetic probe
ggtggtggatgagttgtttatgaac

SEQ ID NO: 4292 - DNA, 25 bp, Artificial Sequence
  Description of Artificial Sequence: Synthetic probe
aggttttatgaaggagatccaccgt

SEQ ID NO: 4293 - DNA, 25 bp, Artificial Sequence
  Description of Artificial Sequence: Synthetic probe
cttatttatggacgcggaactcttg

SEQ ID NO: 4294 - DNA, 25 bp, Artificial Sequence
  Description of Artificial Sequence: Synthetic probe
gtgtggaatgtgtgctcgcactttg

SEQ ID NO: 4295 - DNA, 25 bp, Artificial Sequence
  Description of Artificial Sequence: Synthetic probe
cctacaaatgtgtgtgatgtcgtac

SEQ ID NO: 4296 - DNA, 25 bp, Artificial Sequence
  Description of Artificial Sequence: Synthetic probe
ccgtgtagaatgtgtactccacttt

SEQ ID NO: 4297 - DNA, 25 bp, Artificial Sequence
  Description of Artificial Sequence: Synthetic probe
acgaaacaatgtctgggttcgacag

SEQ ID NO: 4298 - DNA, 25 bp, Artificial Sequence
  Description of Artificial Sequence: Synthetic probe
attgtcaatgtgtgtcctttcggtc

SEQ ID NO: 4299 - DNA, 25 bp, Artificial Sequence
  Description of Artificial Sequence: Synthetic probe
aaaaaatgtcgtcggtcaactccag

SEQ ID NO: 4300 - DNA, 25 bp, Artificial Sequence
  Description of Artificial Sequence: Synthetic probe
acgtatctggatgtgtgtatttgca

SEQ ID NO: 4301 - DNA, 25 bp, Artificial Sequence
  Description of Artificial Sequence: Synthetic probe
cacgacccatgtcgttgtgtagtgt

SEQ ID NO: 4302 - DNA, 25 bp, Artificial Sequence
  Description of Artificial Sequence: Synthetic probe
acacgaagtacatgtgtgtgcgtac

SEQ ID NO: 4303 - DNA, 25 bp, Artificial Sequence
  Description of Artificial Sequence: Synthetic probe
acagatggatgtgtgttcgtgtaca

SEQ ID NO: 4304 - DNA, 25 bp, Artificial Sequence
  Description of Artificial Sequence: Synthetic probe
actcaaagatgtgtgtgctcccgaa

SEQ ID NO: 4305 - DNA, 25 bp, Artificial Sequence
  Description of Artificial Sequence: Synthetic probe
attactccgatgtcgtgtgtcgagc

SEQ ID NO: 4306 - DNA, 25 bp, Artificial Sequence
  Description of Artificial Sequence: Synthetic probe
attagaggatgtcgtgtcgtttatc

SEQ ID NO: 4307 - DNA, 25 bp, Artificial Sequence
  Description of Artificial Sequence: Synthetic probe
caccgtgtgtatgttaatgtcgctt

SEQ ID NO: 4308 - DNA, 25 bp, Artificial Sequence
  Description of Artificial Sequence: Synthetic probe
ggtttgtatatgtgtggtctacgac

SEQ ID NO: 4309 - skipped

SEQ ID NO: 4310 - DNA, 25 bp, Artificial Sequence
  Description of Artificial Sequence: Synthetic probe
cgagaccctatgtgtgtgcgcgtcg

SEQ ID NO: 4311 - DNA, 25 bp, Artificial Sequence
  Description of Artificial Sequence: Synthetic probe
taacgaccctatgtctgtactcggc

SEQ ID NO: 4312 - DNA, 25 bp, Artificial Sequence
  Description of Artificial Sequence: Synthetic probe
agtaccctctatgtgtgagtggaac

SEQ ID NO: 4313 - DNA, 25 bp, Artificial Sequence
  Description of Artificial Sequence: Synthetic probe
tctgtgtccgtatgtgtagatatgt

SEQ ID NO: 4314 - DNA, 25 bp, Artificial Sequence
  Description of Artificial Sequence: Synthetic probe
attagtgtcctttgtgttgagtatc

SEQ ID NO: 4315 - DNA, 25 bp, Artificial Sequence
  Description of Artificial Sequence: Synthetic probe
gatgagtcgtacctttgttctactt

SEQ ID NO: 4316 - DNA, 25 bp, Artificial Sequence
  Description of Artificial Sequence: Synthetic probe
caaatccttgtgtgtgtccatctgt

SEQ ID NO: 4317 - DNA, 25 bp, Artificial Sequence
  Description of Artificial Sequence: Synthetic probe
tcccgtcccttcctcactgtggatg

SEQ ID NO: 4318 - DNA, 25 bp, Artificial Sequence
  Description of Artificial Sequence: Synthetic probe
ttcccgaccttctcgtccgaaagag

SEQ ID NO: 4319 - DNA, 25 bp, Artificial Sequence
  Description of Artificial Sequence: Synthetic probe
agaacttcacttcgtgatgtgtgtc

SEQ ID NO: 4320 - DNA, 25 bp, Artificial Sequence
  Description of Artificial Sequence: Synthetic probe
actggcccttcgagtacgctgacga

SEQ ID NO: 4321 - DNA, 25 bp, Artificial Sequence
  Description of Artificial Sequence: Synthetic probe
accataagctttgtgtgtcctccgg

SEQ ID NO: 4322 - DNA, 25 bp, Artificial Sequence
  Description of Artificial Sequence: Synthetic probe
cgtgtgcggcttgcccttctgcgcg

SEQ ID NO: 4323 - DNA, 25 bp, Artificial Sequence
  Description of Artificial Sequence: Synthetic probe
gtgtcccggcttgaagaagacgccc

SEQ ID NO: 4324 - DNA, 25 bp, Artificial Sequence
  Description of Artificial Sequence: Synthetic probe
acatgtaccgcttcgatctctgaca

SEQ ID NO: 4325 - DNA, 25 bp, Artificial Sequence
  Description of Artificial Sequence: Synthetic probe
accgaccacgcttaccggaccgtgt

SEQ ID NO: 4326 - DNA, 25 bp, Artificial Sequence
  Description of Artificial Sequence: Synthetic probe
gacctcgacccttattcgacggagg

SEQ ID NO: 4327 - DNA, 25 bp, Artificial Sequence
  Description of Artificial Sequence: Synthetic probe
tcttaaaccttagtcgcgtgtgggg

SEQ ID NO: 4328 - DNA, 25 bp, Artificial Sequence
  Description of Artificial Sequence: Synthetic probe
ctcggtttctgcttgcttcgtttgt

SEQ ID NO: 4329 - DNA, 25 bp, Artificial Sequence
  Description of Artificial Sequence: Synthetic probe
gcgtgcgtgttcttggacctacctc

SEQ ID NO: 4330 - DNA, 25 bp, Artificial Sequence
  Description of Artificial Sequence: Synthetic probe
gctttttcttcgaccgggtggttac

SEQ ID NO: 4331 - DNA, 25 bp, Artificial Sequence
  Description of Artificial Sequence: Synthetic probe
ctctccgtctcttggattttctctt

SEQ ID NO: 4332 - DNA, 25 bp, Artificial Sequence
  Description of Artificial Sequence: Synthetic probe
aactagtgtctcttgggtgtctaca

SEQ ID NO: 4333 - DNA, 25 bp, Artificial Sequence
  Description of Artificial Sequence: Synthetic probe
ctttttcttcgaccgggtggttact

SEQ ID NO: 4334 - DNA, 25 bp, Artificial Sequence
  Description of Artificial Sequence: Synthetic probe
acaggcactcttgaggggctaccca

SEQ ID NO: 4335 - DNA, 25 bp, Artificial Sequence
  Description of Artificial Sequence: Synthetic probe
acgtccacactcttgagaaaagtag

SEQ ID NO: 4336 - DNA, 25 bp, Artificial Sequence
  Description of Artificial Sequence: Synthetic probe
agggactctcttcgcattctgtttg

SEQ ID NO: 4337 - DNA, 25 bp, Artificial Sequence
  Description of Artificial Sequence: Synthetic probe
catgaagtcttgtggttgtagtcta

SEQ ID NO: 4338 - DNA, 25 bp, Artificial Sequence
  Description of Artificial Sequence: Synthetic probe
aagaatagtctttgtgtgaagtaag

SEQ ID NO: 4339 - DNA, 25 bp, Artificial Sequence
  Description of Artificial Sequence: Synthetic probe
aaaggactcttccaccgacgacgga

SEQ ID NO: 4340 - DNA, 25 bp, Artificial Sequence
  Description of Artificial Sequence: Synthetic probe
agtgtgtcgcgtctttgtacaaaag

SEQ ID NO: 4341 - DNA, 25 bp, Artificial Sequence
  Description of Artificial Sequence: Synthetic probe
ctctatgtgtcttgtggttcttgtg

SEQ ID NO: 4342 - DNA, 25 bp, Artificial Sequence
  Description of Artificial Sequence: Synthetic probe
aaaagtgtctttgttcgtcggacca

SEQ ID NO: 4343 - DNA, 25 bp, Artificial Sequence
  Description of Artificial Sequence: Synthetic probe
acgtctggtgtcttgagtggtctat

SEQ ID NO: 4344 - DNA, 25 bp, Artificial Sequence
  Description of Artificial Sequence: Synthetic probe
agacgacccgtcttcagaaaggccc

SEQ ID NO: 4345 - DNA, 25 bp, Artificial Sequence
  Description of Artificial Sequence: Synthetic probe
agaacaagtcttcgtgtgcgtgtcg

SEQ ID NO: 4346 - DNA, 25 bp, Artificial Sequence
  Description of Artificial Sequence: Synthetic probe
aatccctcttaactactgagtcgag

SEQ ID NO: 4347 - DNA, 25 bp, Artificial Sequence
  Description of Artificial Sequence: Synthetic probe
cgtccacacactttctgctaggttg

SEQ ID NO: 4348 - DNA, 25 bp, Artificial Sequence
  Description of Artificial Sequence: Synthetic probe
gtgtgtgttaactttgttttatgta

SEQ ID NO: 4349 - DNA, 25 bp, Artificial Sequence
  Description of Artificial Sequence: Synthetic probe
acggggtcacttgttggtgtctctc

SEQ ID NO: 4350 - DNA, 25 bp, Artificial Sequence
  Description of Artificial Sequence: Synthetic probe
gtgtgtacgtgcactttgaggtcag

SEQ ID NO: 4351 - DNA, 25 bp, Artificial Sequence
  Description of Artificial Sequence: Synthetic probe
gacaggcacacttcctaacggtcct

SEQ ID NO: 4352 - DNA, 25 bp, Artificial Sequence
  Description of Artificial Sequence: Synthetic probe
agcagtccacttcgtcacccttacc

SEQ ID NO: 4353 - DNA, 25 bp, Artificial Sequence
  Description of Artificial Sequence: Synthetic probe
ccgtacacacacttctagtagggaa

SEQ ID NO: 4354 - DNA, 25 bp, Artificial Sequence
  Description of Artificial Sequence: Synthetic probe
tggtcccgacttgcgccgatcaagg

SEQ ID NO: 4355 - DNA, 25 bp, Artificial Sequence
  Description of Artificial Sequence: Synthetic probe
gaccgtcggtgacttccatagaaga

SEQ ID NO: 4356 - DNA, 25 bp, Artificial Sequence
  Description of Artificial Sequence: Synthetic probe
agttcgacacgacttctattttgat

SEQ ID NO: 4357 - DNA, 25 bp, Artificial Sequence
  Description of Artificial Sequence: Synthetic probe
aggaaaacttactcgcatcgtgtat

SEQ ID NO: 4358 - DNA, 25 bp, Artificial Sequence
  Description of Artificial Sequence: Synthetic probe
aggtcggtgtactttcggttccagt

SEQ ID NO: 4359 - DNA, 25 bp, Artificial Sequence
  Description of Artificial Sequence: Synthetic probe
gtgggtttactttcgtattgtacgt

SEQ ID NO: 4360 - DNA, 25 bp, Artificial Sequence
  Description of Artificial Sequence: Synthetic probe
aagtctatcgtactttgtgtgtgga

SEQ ID NO: 4361 - DNA, 25 bp, Artificial Sequence
  Description of Artificial Sequence: Synthetic probe
ctaatgcggtggtgtgaagtggaaa

SEQ ID NO: 4362 - DNA, 25 bp, Artificial Sequence
  Description of Artificial Sequence: Synthetic probe
ttcaccgacctgggactttggacca

SEQ ID NO: 4363 - DNA, 25 bp, Artificial Sequence
  Description of Artificial Sequence: Synthetic probe
acggctgtgctgtgacggatatagt

SEQ ID NO: 4364 - DNA, 25 bp, Artificial Sequence
  Description of Artificial Sequence: Synthetic probe
gctcgagatcctgggtgtgtgtctt

SEQ ID NO: 4365 - DNA, 25 bp, Artificial Sequence
  Description of Artificial Sequence: Synthetic probe
ctctgttacctggtgtggtgtcacc

SEQ ID NO: 4366 - DNA, 25 bp, Artificial Sequence
  Description of Artificial Sequence: Synthetic probe
tcgaggccctggtgaacggtcccac

SEQ ID NO: 4367 - DNA, 25 bp, Artificial Sequence
  Description of Artificial Sequence: Synthetic probe
ggtggtcgtgctgcgttggtgggcc

SEQ ID NO: 4368 - DNA, 25 bp, Artificial Sequence
  Description of Artificial Sequence: Synthetic probe
ggtctaacggctgacttttattacc

SEQ ID NO: 4369 - DNA, 25 bp, Artificial Sequence
  Description of Artificial Sequence: Synthetic probe
actccctacctgctcgttcacgacc

SEQ ID NO: 4370 - DNA, 25 bp, Artificial Sequence
  Description of Artificial Sequence: Synthetic probe
gccgcgcgcctgcaagccactcgtg

SEQ ID NO: 4371 - DNA, 25 bp, Artificial Sequence
  Description of Artificial Sequence: Synthetic probe
tctctctgtgctgcctacgtgcgtg

SEQ ID NO: 4372 - DNA, 25 bp, Artificial Sequence
  Description of Artificial Sequence: Synthetic probe
tttgtgtcgctggtgtccttgtaca

SEQ ID NO: 4373 - DNA, 25 bp, Artificial Sequence
  Description of Artificial Sequence: Synthetic probe
gccgccgcgctgaggaaacactgtc

SEQ ID NO: 4374 - DNA, 25 bp, Artificial Sequence
  Description of Artificial Sequence: Synthetic probe
agtcacagcctgacgacaacaggtt

SEQ ID NO: 4375 - DNA, 25 bp, Artificial Sequence
  Description of Artificial Sequence: Synthetic probe
gtcattcctctggttggtgtggata

SEQ ID NO: 4376 - DNA, 25 bp, Artificial Sequence
  Description of Artificial Sequence: Synthetic probe
agaaacgcgtctgtggaatgattag

SEQ ID NO: 4377 - DNA, 25 bp, Artificial Sequence
  Description of Artificial Sequence: Synthetic probe
tcttttgtctgcgtctgccaaaagt

SEQ ID NO: 4378 - DNA, 25 bp, Artificial Sequence
  Description of Artificial Sequence: Synthetic probe
aggagccgctgacccttcttagcct

SEQ ID NO: 4379 - DNA, 25 bp, Artificial Sequence
  Description of Artificial Sequence: Synthetic probe
gtatcctattctggtgtcgtgtccg

SEQ ID NO: 4380 - DNA, 25 bp, Artificial Sequence
  Description of Artificial Sequence: Synthetic probe
aaactgagtctggtggtgtgacaac

SEQ ID NO: 4381 - DNA, 25 bp, Artificial Sequence
  Description of Artificial Sequence: Synthetic probe
ccctgttctgaaacggttaagttcg

SEQ ID NO: 4382 - DNA, 25 bp, Artificial Sequence
  Description of Artificial Sequence: Synthetic probe
gtactctgtttctgcggttggtcta

SEQ ID NO: 4383 - DNA, 25 bp, Artificial Sequence
  Description of Artificial Sequence: Synthetic probe
gtctttgtgtctggtacttcacttt

SEQ ID NO: 4384 - DNA, 25 bp, Artificial Sequence
  Description of Artificial Sequence: Synthetic probe
actcgtgctgtctgcggtaatatcg

SEQ ID NO: 4385 - DNA, 25 bp, Artificial Sequence
  Description of Artificial Sequence: Synthetic probe
ttcgacgccgtctgggtcgcccgtg

SEQ ID NO: 4386 - DNA, 25 bp, Artificial Sequence
  Description of Artificial Sequence: Synthetic probe
ttccaccgtctgagtttacagaccg

SEQ ID NO: 4387 - DNA, 25 bp, Artificial Sequence
  Description of Artificial Sequence: Synthetic probe
tggtgtggctgtcgaaagcctacga

SEQ ID NO: 4388 - DNA, 25 bp, Artificial Sequence
  Description of Artificial Sequence: Synthetic probe
gagccgcacgtctgattcgcgcgaa

SEQ ID NO: 4389 - DNA, 25 bp, Artificial Sequence
  Description of Artificial Sequence: Synthetic probe
atatcaacctgtggtggtgcatgac

SEQ ID NO: 4390 - DNA, 25 bp, Artificial Sequence
  Description of Artificial Sequence: Synthetic probe
agtatattcctgtgacggtggttgt

SEQ ID NO: 4391 - DNA, 25 bp, Artificial Sequence
  Description of Artificial Sequence: Synthetic probe
ccctcgacctgtccgtttaaaacga

SEQ ID NO: 4392 - DNA, 25 bp, Artificial Sequence
  Description of Artificial Sequence: Synthetic probe
attcggacctgtgtggtgtcacttc

SEQ ID NO: 4393 - DNA, 25 bp, Artificial Sequence
  Description of Artificial Sequence: Synthetic probe
aggtaacacctgtcccgcagaatcc

SEQ ID NO: 4394 - DNA, 25 bp, Artificial Sequence
  Description of Artificial Sequence: Synthetic probe
gtcgaggaggctgtccagaccttag

SEQ ID NO: 4395 - DNA, 25 bp, Artificial Sequence
  Description of Artificial Sequence: Synthetic probe
ccggtcgtacctgtggtcctggtcc

SEQ ID NO: 4396 - DNA, 25 bp, Artificial Sequence
  Description of Artificial Sequence: Synthetic probe
gtccaaacgctgtctgtgtgtacct

SEQ ID NO: 4397 - DNA, 25 bp, Artificial Sequence
  Description of Artificial Sequence: Synthetic probe
ctcaaatctgtgtctgtgcaatcat

SEQ ID NO: 4398 - DNA, 25 bp, Artificial Sequence
  Description of Artificial Sequence: Synthetic probe
agtggtcttctgttggtgtcaaacc

SEQ ID NO: 4399 - DNA, 25 bp, Artificial Sequence
  Description of Artificial Sequence: Synthetic probe
tcaggccgtctgtttgtggcgtgac

SEQ ID NO: 4400 - DNA, 25 bp, Artificial Sequence
  Description of Artificial Sequence: Synthetic probe
tgacgcgccgctgtgtgtcgtcgtt

SEQ ID NO: 4401 - DNA, 25 bp, Artificial Sequence
  Description of Artificial Sequence: Synthetic probe
cgacgctcgtgctgtgcgccggccc

SEQ ID NO: 4402 - DNA, 25 bp, Artificial Sequence
  Description of Artificial Sequence: Synthetic probe
attactgtgtctgtggttaccaacc

SEQ ID NO: 4403 - DNA, 25 bp, Artificial Sequence
  Description of Artificial Sequence: Synthetic probe
atgagtaactctgtgtgcatctacg

SEQ ID NO: 4404 - DNA, 25 bp, Artificial Sequence
  Description of Artificial Sequence: Synthetic probe
ggtcctttctgtgggcgtgtatccc

SEQ ID NO: 4405 - DNA, 25 bp, Artificial Sequence
  Description of Artificial Sequence: Synthetic probe
acttcattctgtgtgtgtacccggg

SEQ ID NO: 4406 - DNA, 25 bp, Artificial Sequence
  Description of Artificial Sequence: Synthetic probe
ataatatctctgtgtgtgcggaact

SEQ ID NO: 4407 - DNA, 25 bp, Artificial Sequence
  Description of Artificial Sequence: Synthetic probe
cggtagtcttctgtgtgacctcgcg

SEQ ID NO: 4408 - DNA, 25 bp, Artificial Sequence
  Description of Artificial Sequence: Synthetic probe
agcagattctgtgctgtgtgaccga

SEQ ID NO: 4409 - DNA, 25 bp, Artificial Sequence
  Description of Artificial Sequence: Synthetic probe
actggttctctgtgtctgtactcgg

SEQ ID NO: 4410 - DNA, 25 bp, Artificial Sequence
  Description of Artificial Sequence: Synthetic probe
aggggtgtctgtctaaaccttcctt

SEQ ID NO: 4411 - DNA, 25 bp, Artificial Sequence
  Description of Artificial Sequence: Synthetic probe
cacggggtctgtgttggatgtttac

SEQ ID NO: 4412 - DNA, 25 bp, Artificial Sequence
  Description of Artificial Sequence: Synthetic probe
gtgtccatgtctgttcgtctcgtct

SEQ ID NO: 4413 - DNA, 25 bp, Artificial Sequence
  Description of Artificial Sequence: Synthetic probe
atagtactgttctgtcggtgtcctc

SEQ ID NO: 4414 - DNA, 25 bp, Artificial Sequence
  Description of Artificial Sequence: Synthetic probe
cagttactgtctgtggttcgcccag

SEQ ID NO: 4415 - DNA, 25 bp, Artificial Sequence
  Description of Artificial Sequence: Synthetic probe
cggtgtgcgtctgtctccagtgtca

SEQ ID NO: 4416 - DNA, 25 bp, Artificial Sequence
  Description of Artificial Sequence: Synthetic probe
agatagaagtctgtcggttcctcct

SEQ ID NO: 4417 - DNA, 25 bp, Artificial Sequence
  Description of Artificial Sequence: Synthetic probe
accttgtgtctgtcgttcgtgttaa

SEQ ID NO: 4418 - DNA, 25 bp, Artificial Sequence
  Description of Artificial Sequence: Synthetic probe
cttaaaactggacgatacaacaatc

SEQ ID NO: 4419 - DNA, 25 bp, Artificial Sequence
  Description of Artificial Sequence: Synthetic probe
cagccacactgaccggaccgtgtct

SEQ ID NO: 4420 - DNA, 25 bp, Artificial Sequence
  Description of Artificial Sequence: Synthetic probe
attcagtatactggtgtgtgggacc

SEQ ID NO: 4421 - DNA, 25 bp, Artificial Sequence
  Description of Artificial Sequence: Synthetic probe
ctccaccgactgacgcctacacgcg

SEQ ID NO: 4422 - DNA, 25 bp, Artificial Sequence
  Description of Artificial Sequence: Synthetic probe
caaagagactgtgtgtgttctacat

SEQ ID NO: 4423 - DNA, 25 bp, Artificial Sequence
  Description of Artificial Sequence: Synthetic probe
attcaaactgtgtgtctggagtcgc

SEQ ID NO: 4424 - DNA, 25 bp, Artificial Sequence
  Description of Artificial Sequence: Synthetic probe
aagtttttccctaccacgtgcgagc

SEQ ID NO: 4425 - DNA, 25 bp, Artificial Sequence
  Description of Artificial Sequence: Synthetic probe
agcacatttcctgttgttgtcgtcc

SEQ ID NO: 4426 - DNA, 25 bp, Artificial Sequence
  Description of Artificial Sequence: Synthetic probe
aaattttcctgtgtgtgtacgcgta

SEQ ID NO: 4427 - DNA, 25 bp, Artificial Sequence
  Description of Artificial Sequence: Synthetic probe
cgacacgaccttccaagaggtacct

SEQ ID NO: 4428 - DNA, 25 bp, Artificial Sequence
  Description of Artificial Sequence: Synthetic probe
gtgtgtgtgtttccgtctgtgcaaa

SEQ ID NO: 4429 - DNA, 25 bp, Artificial Sequence
  Description of Artificial Sequence: Synthetic probe
aaagtgcttccggttcgatagtctc

SEQ ID NO: 4430 - DNA, 25 bp, Artificial Sequence
  Description of Artificial Sequence: Synthetic probe
gtacgtgtgcgagttccacttccag

SEQ ID NO: 4431 - DNA, 25 bp, Artificial Sequence
  Description of Artificial Sequence: Synthetic probe
cactacgctagttccgtgtgtgtct

SEQ ID NO: 4432 - DNA, 25 bp, Artificial Sequence
  Description of Artificial Sequence: Synthetic probe
gtaaattttcatgcgtgtgcgaatg

SEQ ID NO: 4433 - DNA, 25 bp, Artificial Sequence
  Description of Artificial Sequence: Synthetic probe
agtttatttcaacgacgacatcgtt

SEQ ID NO: 4434 - DNA, 25 bp, Artificial Sequence
  Description of Artificial Sequence: Synthetic probe
atctatgtttcatggtggtgtctcg

SEQ ID NO: 4435 - DNA, 25 bp, Artificial Sequence
  Description of Artificial Sequence: Synthetic probe
ctacccttctcattaggtggtggtg

SEQ ID NO: 4436 - DNA, 25 bp, Artificial Sequence
  Description of Artificial Sequence: Synthetic probe
gttacctgattcaccgaccgcagta

SEQ ID NO: 4437 - DNA, 25 bp, Artificial Sequence
  Description of Artificial Sequence: Synthetic probe
gggttaggttcagtttgaaacgtgt

SEQ ID NO: 4438 - DNA, 25 bp, Artificial Sequence
  Description of Artificial Sequence: Synthetic probe
gtatcaactcttcacgtaaggtctt

SEQ ID NO: 4439 - DNA, 25 bp, Artificial Sequence
  Description of Artificial Sequence: Synthetic probe
ccagctttctgtggtggtactgtta

SEQ ID NO: 4440 - DNA, 25 bp, Artificial Sequence
  Description of Artificial Sequence: Synthetic probe
cgtgccgtttctctttctcctttca

SEQ ID NO: 4441 - DNA, 25 bp, Artificial Sequence
  Description of Artificial Sequence: Synthetic probe
aaagttttctgtgtgcgtggtcacc

SEQ ID NO: 4442 - DNA, 25 bp, Artificial Sequence
  Description of Artificial Sequence: Synthetic probe
ctctacgaacttcttgagttgtttt

SEQ ID NO: 4443 - DNA, 25 bp, Artificial Sequence
  Description of Artificial Sequence: Synthetic probe
aactcagtcttcttcgtcgtaacgg

SEQ ID NO: 4444 - DNA, 25 bp, Artificial Sequence
  Description of Artificial Sequence: Synthetic probe
gagtttccgttctgtggttcgtcct

SEQ ID NO: 4445 - DNA, 25 bp, Artificial Sequence
  Description of Artificial Sequence: Synthetic probe
agtttccgttctgtggttcgtcctt

SEQ ID NO: 4446 - DNA, 25 bp, Artificial Sequence
  Description of Artificial Sequence: Synthetic probe
atccgttgttctctgtgtgcaccgt

SEQ ID NO: 4447 - DNA, 25 bp, Artificial Sequence
  Description of Artificial Sequence: Synthetic probe
taggactggttctccgtgtgtgtcg

SEQ ID NO: 4448 - DNA, 25 bp, Artificial Sequence
  Description of Artificial Sequence: Synthetic probe
agagggcatccagggtacaccacgc

SEQ ID NO: 4449 - DNA, 25 bp, Artificial Sequence
  Description of Artificial Sequence: Synthetic probe
catttcatcctcgtcaattaagttc

SEQ ID NO: 4450 - DNA, 25 bp, Artificial Sequence
  Description of Artificial Sequence: Synthetic probe
tcgtgtgcggatcctttgcggtaag

SEQ ID NO: 4451 - DNA, 25 bp, Artificial Sequence
  Description of Artificial Sequence: Synthetic probe
ctagacaacatcctcgtctgactca

SEQ ID NO: 4452 - DNA, 25 bp, Artificial Sequence
  Description of Artificial Sequence: Synthetic probe
ctgccacgatccgtcataagggagt

SEQ ID NO: 4453 - DNA, 25 bp, Artificial Sequence
  Description of Artificial Sequence: Synthetic probe
ataacagctatcagaggttttccac

SEQ ID NO: 4454 - DNA, 25 bp, Artificial Sequence
  Description of Artificial Sequence: Synthetic probe
cccgacacgatcagaagagacatgg

SEQ ID NO: 4455 - DNA, 25 bp, Artificial Sequence
  Description of Artificial Sequence: Synthetic probe
agacttcgaatcttctcccggaccg

SEQ ID NO: 4456 - DNA, 25 bp, Artificial Sequence
  Description of Artificial Sequence: Synthetic probe
agaacgttcgatctccgtgcgtgac

SEQ ID NO: 4457 - DNA, 25 bp, Artificial Sequence
  Description of Artificial Sequence: Synthetic probe
aatttcttcgttggagtggtgtgga

SEQ ID NO: 4458 - DNA, 25 bp, Artificial Sequence
  Description of Artificial Sequence: Synthetic probe
ggacgaaggttcgtgcgatgtggga

SEQ ID NO: 4459 - DNA, 25 bp, Artificial Sequence
  Description of Artificial Sequence: Synthetic probe
tcacatcattcggtgtggggtgtct

SEQ ID NO: 4460 - DNA, 25 bp, Artificial Sequence
  Description of Artificial Sequence: Synthetic probe
acaacctattcggttcgtgtgtgaa

SEQ ID NO: 4461 - DNA, 25 bp, Artificial Sequence
  Description of Artificial Sequence: Synthetic probe
tccttgcttcgggtggagagcagaa

SEQ ID NO: 4462 - DNA, 25 bp, Artificial Sequence
  Description of Artificial Sequence: Synthetic probe
gatgtagttattcgtgtgtggtcaa

SEQ ID NO: 4463 - DNA, 25 bp, Artificial Sequence
  Description of Artificial Sequence: Synthetic probe
gtaggtattcttcgtgcacacacca

SEQ ID NO: 4464 - DNA, 25 bp, Artificial Sequence
  Description of Artificial Sequence: Synthetic probe
acgaaccgagttcgtggtggttagc

SEQ ID NO: 4465 - DNA, 25 bp, Artificial Sequence
  Description of Artificial Sequence: Synthetic probe
ttttcattcgtcgtggtgtgtcacc

SEQ ID NO: 4466 - DNA, 25 bp, Artificial Sequence
  Description of Artificial Sequence: Synthetic probe
tcaacacagttcgtgcgtgtacatc

SEQ ID NO: 4467 - DNA, 25 bp, Artificial Sequence
  Description of Artificial Sequence: Synthetic probe
gtcgagtgttagttcgtgtcgtttg

SEQ ID NO: 4468 - DNA, 25 bp, Artificial Sequence
  Description of Artificial Sequence: Synthetic probe
acacacacacatcggcagttagagg

SEQ ID NO: 4469 - DNA, 25 bp, Artificial Sequence
  Description of Artificial Sequence: Synthetic probe
gtgccaacatcgacgacacctgagc

SEQ ID NO: 4470 - DNA, 25 bp, Artificial Sequence
  Description of Artificial Sequence: Synthetic probe
accgaccacgatcgagacttgagac

SEQ ID NO: 4471 - DNA, 25 bp, Artificial Sequence
  Description of Artificial Sequence: Synthetic probe
ctgtcagaatcgtgtctgtgtgcga

SEQ ID NO: 4472 - DNA, 25 bp, Artificial Sequence
  Description of Artificial Sequence: Synthetic probe
ttcgaaaatcgtgcgagtgcataat

SEQ ID NO: 4473 - DNA, 25 bp, Artificial Sequence
  Description of Artificial Sequence: Synthetic probe
ctctgggtatcgaagtctgttccgt

SEQ ID NO: 4474 - DNA, 25 bp, Artificial Sequence
  Description of Artificial Sequence: Synthetic probe
gattctccatcgtcgtcgttgtcgc

SEQ ID NO: 4475 - DNA, 25 bp, Artificial Sequence
  Description of Artificial Sequence: Synthetic probe
accctcgcctccatgagcatacggg

SEQ ID NO: 4476 - skipped

SEQ ID NO: 4477 - DNA, 25 bp, Artificial Sequence
  Description of Artificial Sequence: Synthetic probe
ctgtccggctcctcttatttaagtg

SEQ ID NO: 4478 - skipped

SEQ ID NO: 4479 - DNA, 25 bp, Artificial Sequence
  Description of Artificial Sequence: Synthetic probe
ctcgtcctcctccatgtacattata

SEQ ID NO: 4480 - DNA, 25 bp, Artificial Sequence
  Description of Artificial Sequence: Synthetic probe
tcgtaacgtcgcctcctagaacgta

SEQ ID NO: 4481 - DNA, 25 bp, Artificial Sequence
  Description of Artificial Sequence: Synthetic probe
cagtcgctcctcctcgctgccaatg

SEQ ID NO: 4482 - DNA, 25 bp, Artificial Sequence
  Description of Artificial Sequence: Synthetic probe
aaaccgacctccacgggacacacgg

SEQ ID NO: 4483 - DNA, 25 bp, Artificial Sequence
  Description of Artificial Sequence: Synthetic probe
ttccacacctcctcgagaaggacgt

SEQ ID NO: 4484 - DNA, 25 bp, Artificial Sequence
  Description of Artificial Sequence: Synthetic probe
aactactatagctccgtcctcgtgg

SEQ ID NO: 4485 - DNA, 25 bp, Artificial Sequence
  Description of Artificial Sequence: Synthetic probe
ggccgccgctcagccaggctcccgg

SEQ ID NO: 4486 - DNA, 25 bp, Artificial Sequence
  Description of Artificial Sequence: Synthetic probe
gaaccgtctcctcattaagttaggg

SEQ ID NO: 4487 - DNA, 25 bp, Artificial Sequence
  Description of Artificial Sequence: Synthetic probe
atacctcgacctcagatattcggtg

SEQ ID NO: 4488 - DNA, 25 bp, Artificial Sequence
  Description of Artificial Sequence: Synthetic probe
acgtggactcctcatcgtcgtgacg

SEQ ID NO: 4489 - DNA, 25 bp, Artificial Sequence
  Description of Artificial Sequence: Synthetic probe
ggagcaccctcaccacaggcccgga

SEQ ID NO: 4490 - DNA, 25 bp, Artificial Sequence
  Description of Artificial Sequence: Synthetic probe
caccttcctcacctcataaagaggt

SEQ ID NO: 4491 - DNA, 25 bp, Artificial Sequence
  Description of Artificial Sequence: Synthetic probe
cttccgcctcacctcattgttggag

SEQ ID NO: 4492 - DNA, 25 bp, Artificial Sequence
  Description of Artificial Sequence: Synthetic probe
ccaaggctcacgagacgcctgaggt

SEQ ID NO: 4493 - DNA, 25 bp, Artificial Sequence
  Description of Artificial Sequence: Synthetic probe
aggaacctctcaatgtcgtgtgtca

SEQ ID NO: 4494 - DNA, 25 bp, Artificial Sequence
  Description of Artificial Sequence: Synthetic probe
ggtcccacgtctccttctactgtcg

SEQ ID NO: 4495 - DNA, 25 bp, Artificial Sequence
  Description of Artificial Sequence: Synthetic probe
gtcctctgatctcatgtctctcgta

SEQ ID NO: 4496 - DNA, 25 bp, Artificial Sequence
  Description of Artificial Sequence: Synthetic probe
cttcctgtctcatacgacattggtg

SEQ ID NO: 4497 - DNA, 25 bp, Artificial Sequence
  Description of Artificial Sequence: Synthetic probe
agtgccgcctctttctcgatcagtg

SEQ ID NO: 4498 - DNA, 25 bp, Artificial Sequence
  Description of Artificial Sequence: Synthetic probe
attttcctctgaggtgtggtgtcca

SEQ ID NO: 4499 - DNA, 25 bp, Artificial Sequence
  Description of Artificial Sequence: Synthetic probe
cttgtgcctctctatttgtgtgcgg

SEQ ID NO: 4500 - DNA, 25 bp, Artificial Sequence
  Description of Artificial Sequence: Synthetic probe
atctcactcctctcgggacaagtcg

SEQ ID NO: 4501 - DNA, 25 bp, Artificial Sequence
  Description of Artificial Sequence: Synthetic probe
cttacctgctctgtggtggtagtca

SEQ ID NO: 4502 - DNA, 25 bp, Artificial Sequence
  Description of Artificial Sequence: Synthetic probe
cataatatctctgtgtgtgcggaac

SEQ ID NO: 4503 - DNA, 25 bp, Artificial Sequence
  Description of Artificial Sequence: Synthetic probe
ccacctctctctatgtggtgtgacg

SEQ ID NO: 4504 - DNA, 25 bp, Artificial Sequence
  Description of Artificial Sequence: Synthetic probe
ctaacaccgactccgcggtgcgaag

SEQ ID NO: 4505 - DNA, 25 bp, Artificial Sequence
  Description of Artificial Sequence: Synthetic probe
acttcgtcacactcaccttttcatt

SEQ ID NO: 4506 - DNA, 25 bp, Artificial Sequence
  Description of Artificial Sequence: Synthetic probe
acactcacacactcatcctctctcc

SEQ ID NO: 4507 - DNA, 25 bp, Artificial Sequence
  Description of Artificial Sequence: Synthetic probe
gtgtgtgtgaactcaacggacccac

SEQ ID NO: 4508 - DNA, 25 bp, Artificial Sequence
  Description of Artificial Sequence: Synthetic probe
acgtcgtcaacgactccgcggtcga

SEQ ID NO: 4509 - DNA, 25 bp, Artificial Sequence
  Description of Artificial Sequence: Synthetic probe
tgtgtgtgcgactccgaggaccctt

SEQ ID NO: 4510 - DNA, 25 bp, Artificial Sequence
  Description of Artificial Sequence: Synthetic probe
ccaccgtcactcacgaggacgaggt

SEQ ID NO: 4511 - DNA, 25 bp, Artificial Sequence
  Description of Artificial Sequence: Synthetic probe
gtctccgccgtactcatgtcatcgg

SEQ ID NO: 4512 - DNA, 25 bp, Artificial Sequence
  Description of Artificial Sequence: Synthetic probe
ctgtatcaactcttcacgtaaggtc

SEQ ID NO: 4513 - DNA, 25 bp, Artificial Sequence
  Description of Artificial Sequence: Synthetic probe
gtgtcactgtcactctttgacgcga

SEQ ID NO: 4514 - DNA, 25 bp, Artificial Sequence
  Description of Artificial Sequence: Synthetic probe
accgtctccactctcaggttgggtc

SEQ ID NO: 4515 - DNA, 25 bp, Artificial Sequence
  Description of Artificial Sequence: Synthetic probe
ctccgtccactcttagggtagaagt

SEQ ID NO: 4516 - DNA, 25 bp, Artificial Sequence
  Description of Artificial Sequence: Synthetic probe
agttatgtctactcttgtgtgtggt

SEQ ID NO: 4517 - DNA, 25 bp, Artificial Sequence
  Description of Artificial Sequence: Synthetic probe
gtccgacaccactctaatcctttag

SEQ ID NO: 4518 - DNA, 25 bp, Artificial Sequence
  Description of Artificial Sequence: Synthetic probe
tcgcctctgctcgtgcgagtgcgtg

SEQ ID NO: 4519 - DNA, 25 bp, Artificial Sequence
  Description of Artificial Sequence: Synthetic probe
atttcacctcgaccacactcttatt

SEQ ID NO: 4520 - DNA, 25 bp, Artificial Sequence
  Description of Artificial Sequence: Synthetic probe
cacccgtcctcgtattaagatacca

SEQ ID NO: 4521 - DNA, 25 bp, Artificial Sequence
  Description of Artificial Sequence: Synthetic probe
ggtccctcactcgtgccatggttaa

SEQ ID NO: 4522 - DNA, 25 bp, Artificial Sequence
  Description of Artificial Sequence: Synthetic probe
gtcacctcgcctcgttagtactgag

SEQ ID NO: 4523 - DNA, 25 bp, Artificial Sequence
  Description of Artificial Sequence: Synthetic probe
gtcgcctctgctcgtgcgagtgcgt

SEQ ID NO: 4524 - DNA, 25 bp, Artificial Sequence
  Description of Artificial Sequence: Synthetic probe
gttctcaacctcgtcaattgtggtg

SEQ ID NO: 4525 - DNA, 25 bp, Artificial Sequence
  Description of Artificial Sequence: Synthetic probe
ctctttcactcgcacacgcgacgtc

SEQ ID NO: 4526 - DNA, 25 bp, Artificial Sequence
  Description of Artificial Sequence: Synthetic probe
gtccggacacctcgtcgtgtgtggt

SEQ ID NO: 4527 - DNA, 25 bp, Artificial Sequence
  Description of Artificial Sequence: Synthetic probe
attgaaactcgtacaatgggtcggg

SEQ ID NO: 4528 - DNA, 25 bp, Artificial Sequence
  Description of Artificial Sequence: Synthetic probe
ctgtctacacactcgtcttcaagag

SEQ ID NO: 4529 - DNA, 25 bp, Artificial Sequence
  Description of Artificial Sequence: Synthetic probe
aaaaaactcggaaggtcgcggtcaa

SEQ ID NO: 4530 - DNA, 25 bp, Artificial Sequence
  Description of Artificial Sequence: Synthetic probe
accatcaactcgtgtgtgtagtgtt

SEQ ID NO: 4531 - DNA, 25 bp, Artificial Sequence
  Description of Artificial Sequence: Synthetic probe
gtacgtgtacgcacactcgcggctc

SEQ ID NO: 4532 - DNA, 25 bp, Artificial Sequence
  Description of Artificial Sequence: Synthetic probe
gtacgtgtccacactcgtacgtatg

SEQ ID NO: 4533 - DNA, 25 bp, Artificial Sequence
  Description of Artificial Sequence: Synthetic probe
gacacacgcacactcgttcggagct

SEQ ID NO: 4534 - skipped

SEQ ID NO: 4535 - DNA, 25 bp, Artificial Sequence
  Description of Artificial Sequence: Synthetic probe
agacggtgtggtttgttgccctaac

SEQ ID NO: 4536 - DNA, 25 bp, Artificial Sequence
  Description of Artificial Sequence: Synthetic probe
taccggagggttgttttgtgtctgt

SEQ ID NO: 4537 - DNA, 25 bp, Artificial Sequence
  Description of Artificial Sequence: Synthetic probe
catgatcggtttggttgggacgaat

SEQ ID NO: 4538 - DNA, 25 bp, Artificial Sequence
  Description of Artificial Sequence: Synthetic probe
taagaggtggttggtcgaaatagaa

SEQ ID NO: 4539 - DNA, 25 bp, Artificial Sequence
  Description of Artificial Sequence: Synthetic probe
cgacttagggttgttgtgaagcgtt

SEQ ID NO: 4540 - DNA, 25 bp, Artificial Sequence
  Description of Artificial Sequence: Synthetic probe
accaagaggtttattgttgacacac

SEQ ID NO: 4541 - DNA, 25 bp, Artificial Sequence
  Description of Artificial Sequence: Synthetic probe
gccaagggttggtcggatctactct

SEQ ID NO: 4542 - DNA, 25 bp, Artificial Sequence
  Description of Artificial Sequence: Synthetic probe
tcgtactccaggttggaacttgagg

SEQ ID NO: 4543 - DNA, 25 bp, Artificial Sequence
  Description of Artificial Sequence: Synthetic probe
gccctgggttgtgtgattcccgtga

SEQ ID NO: 4544 - DNA, 25 bp, Artificial Sequence
  Description of Artificial Sequence: Synthetic probe
gacacttagggttggtcgtcgcagt

SEQ ID NO: 4545 - DNA, 25 bp, Artificial Sequence
  Description of Artificial Sequence: Synthetic probe
cttatcaggttggtgtgtgtccacc

SEQ ID NO: 4546 - DNA, 25 bp, Artificial Sequence
  Description of Artificial Sequence: Synthetic probe
aagaggtggttggtcgaaatagaac

SEQ ID NO: 4547 - DNA, 25 bp, Artificial Sequence
  Description of Artificial Sequence: Synthetic probe
atacaacaggttggtgtctgtcctg

SEQ ID NO: 4548 - DNA, 25 bp, Artificial Sequence
  Description of Artificial Sequence: Synthetic probe
cactcaccggttgggtggtccttag

SEQ ID NO: 4549 - DNA, 25 bp, Artificial Sequence
  Description of Artificial Sequence: Synthetic probe
atttctacggttgtctttctctgtg

SEQ ID NO: 4550 - DNA, 25 bp, Artificial Sequence
  Description of Artificial Sequence: Synthetic probe
agttaatcggtttttgctctgcggt

SEQ ID NO: 4551 - DNA, 25 bp, Artificial Sequence
  Description of Artificial Sequence: Synthetic probe
agtccttcggttgtgtgtgtcgacc

SEQ ID NO: 4552 - DNA, 25 bp, Artificial Sequence
  Description of Artificial Sequence: Synthetic probe
gtattttggttctgttcgttgtctt

SEQ ID NO: 4553 - DNA, 25 bp, Artificial Sequence
  Description of Artificial Sequence: Synthetic probe
atctatcgtcggttgttcgagtccc

SEQ ID NO: 4554 - DNA, 25 bp, Artificial Sequence
  Description of Artificial Sequence: Synthetic probe
ctttgtggttcccagcgacgtgtat

SEQ ID NO: 4555 - DNA, 25 bp, Artificial Sequence
  Description of Artificial Sequence: Synthetic probe
acatcggtggttcggagaaggacac

SEQ ID NO: 4556 - DNA, 25 bp, Artificial Sequence
  Description of Artificial Sequence: Synthetic probe
acgtgggtcggttcacataatataa

SEQ ID NO: 4557 - DNA, 25 bp, Artificial Sequence
  Description of Artificial Sequence: Synthetic probe
ggacctagtggttcggtgttcaaac

SEQ ID NO: 4558 - DNA, 25 bp, Artificial Sequence
  Description of Artificial Sequence: Synthetic probe
agtaagaatgtttggtgttttccta

SEQ ID NO: 4559 - DNA, 25 bp, Artificial Sequence
  Description of Artificial Sequence: Synthetic probe
gtgaatccgtgtttgtggtttagta

SEQ ID NO: 4560 - DNA, 25 bp, Artificial Sequence
  Description of Artificial Sequence: Synthetic probe
gacgtgggtcggttcacataatata

SEQ ID NO: 4561 - DNA, 25 bp, Artificial Sequence
  Description of Artificial Sequence: Synthetic probe
tggtggtggttactgctacgatgtc

SEQ ID NO: 4562 - DNA, 25 bp, Artificial Sequence
  Description of Artificial Sequence: Synthetic probe
cctattcggttcgtgtgtgaaaagt

SEQ ID NO: 4563 - DNA, 25 bp, Artificial Sequence
  Description of Artificial Sequence: Synthetic probe
cgacggtgtgtgttgcaaggagacc

SEQ ID NO: 4564 - DNA, 25 bp, Artificial Sequence
  Description of Artificial Sequence: Synthetic probe
acactgtgtgtgttgtggcctatcg

SEQ ID NO: 4565 - DNA, 25 bp, Artificial Sequence
  Description of Artificial Sequence: Synthetic probe
ttaggcttgttgtcgacttgatcag

SEQ ID NO: 4566 - DNA, 25 bp, Artificial Sequence
  Description of Artificial Sequence: Synthetic probe
ataatcgttgttgttttgagttctc

SEQ ID NO: 4567 - DNA, 25 bp, Artificial Sequence
  Description of Artificial Sequence: Synthetic probe
taaagtgttgtttgtctggtttccc

SEQ ID NO: 4568 - DNA, 25 bp, Artificial Sequence
  Description of Artificial Sequence: Synthetic probe
tgacgcgagttgttgtttagggtca

SEQ ID NO: 4569 - DNA, 25 bp, Artificial Sequence
  Description of Artificial Sequence: Synthetic probe
gtcgttgtttgtttgagtcctccta

SEQ ID NO: 4570 - DNA, 25 bp, Artificial Sequence
  Description of Artificial Sequence: Synthetic probe
ggaaacgttgttggttggattacat

SEQ ID NO: 4571 - DNA, 25 bp, Artificial Sequence
  Description of Artificial Sequence: Synthetic probe
cacgagagttgttggtcggcgaact

SEQ ID NO: 4572 - DNA, 25 bp, Artificial Sequence
  Description of Artificial Sequence: Synthetic probe
actcgtgtcgttgttttgttatcat

SEQ ID NO: 4573 - skipped

SEQ ID NO: 4574 - DNA, 25 bp, Artificial Sequence
  Description of Artificial Sequence: Synthetic probe
ttgtagtattgttcgagtgtgtacg

SEQ ID NO: 4575 - DNA, 25 bp, Artificial Sequence
  Description of Artificial Sequence: Synthetic probe
tctgctatctgttcttgtgtttacg

SEQ ID NO: 4576 - DNA, 25 bp, Artificial Sequence
  Description of Artificial Sequence: Synthetic probe
aaaattgttccggtgtggtgtccct

SEQ ID NO: 4577 - DNA, 25 bp, Artificial Sequence
  Description of Artificial Sequence: Synthetic probe
gtgtcttcggtgttggcttccgttc

SEQ ID NO: 4578 - DNA, 25 bp, Artificial Sequence
  Description of Artificial Sequence: Synthetic probe
atgcggcgtgttttctggtaatcct

SEQ ID NO: 4579 - DNA, 25 bp, Artificial Sequence
  Description of Artificial Sequence: Synthetic probe
aatcgtttgttcgtgtacagtgccc

SEQ ID NO: 4580 - DNA, 25 bp, Artificial Sequence
  Description of Artificial Sequence: Synthetic probe
gtccgtgagtgtgttttcccgatgt

SEQ ID NO: 4581 - DNA, 25 bp, Artificial Sequence
  Description of Artificial Sequence: Synthetic probe
aggtatggtgtttgtagtcgtgttc

SEQ ID NO: 4582 - DNA, 25 bp, Artificial Sequence
  Description of Artificial Sequence: Synthetic probe
gtagtgatggtgtttcccttcttcc

SEQ ID NO: 4583 - DNA, 25 bp, Artificial Sequence
  Description of Artificial Sequence: Synthetic probe
aggaccgagtgttgtgtgtaacaaa

SEQ ID NO: 4584 - DNA, 25 bp, Artificial Sequence
  Description of Artificial Sequence: Synthetic probe
gtcaccgcgtgtgtttagaaattcc

SEQ ID NO: 4585 - DNA, 25 bp, Artificial Sequence
  Description of Artificial Sequence: Synthetic probe
caaaagtgttttggtggtggtagta

SEQ ID NO: 4586 - DNA, 25 bp, Artificial Sequence
  Description of Artificial Sequence: Synthetic probe
gtacctaggtgtgtttcggttcctt

SEQ ID NO: 4587 - DNA, 25 bp, Artificial Sequence
  Description of Artificial Sequence: Synthetic probe
gtccacgtgtgtgttggaccgaccc

SEQ ID NO: 4588 - DNA, 25 bp, Artificial Sequence
  Description of Artificial Sequence: Synthetic probe
acacagactgtgttgggtgaagaat

SEQ ID NO: 4589 - DNA, 25 bp, Artificial Sequence
  Description of Artificial Sequence: Synthetic probe
acccgtgtgtgtttcgaccgtccac

SEQ ID NO: 4590 - DNA, 25 bp, Artificial Sequence
  Description of Artificial Sequence: Synthetic probe
cgctggtgtgttcgttcgtcctcca

SEQ ID NO: 4591 - DNA, 25 bp, Artificial Sequence
  Description of Artificial Sequence: Synthetic probe
acggtcgggtgttctcattatcggg

SEQ ID NO: 4592-4593 - skipped (2 entries)

SEQ ID NO: 4594 - DNA, 25 bp, Artificial Sequence
  Description of Artificial Sequence: Synthetic probe
ccgaccaagttggtgtccggtaccc

SEQ ID NO: 4595 - DNA, 25 bp, Artificial Sequence
  Description of Artificial Sequence: Synthetic probe
gtttgaaagtttcgctctcggggaa

SEQ ID NO: 4596 - DNA, 25 bp, Artificial Sequence
  Description of Artificial Sequence: Synthetic probe
atagatccagttctttttgcccgtc

SEQ ID NO: 4597 - DNA, 25 bp, Artificial Sequence
  Description of Artificial Sequence: Synthetic probe
ggaagactacagttctacacaagtc

SEQ ID NO: 4598 - DNA, 25 bp, Artificial Sequence
  Description of Artificial Sequence: Synthetic probe
aaccacgtgagtttttgtgcgtgcc

SEQ ID NO: 4599 - DNA, 25 bp, Artificial Sequence
  Description of Artificial Sequence: Synthetic probe
cattatagagttcgtgttcgtgtcg

SEQ ID NO: 4600 - DNA, 25 bp, Artificial Sequence
  Description of Artificial Sequence: Synthetic probe
ggtgttggtgtggatccctacgaaa

SEQ ID NO: 4601 - DNA, 25 bp, Artificial Sequence
  Description of Artificial Sequence: Synthetic probe
taaggtggtagttcacaccgagagg

SEQ ID NO: 4602 - DNA, 25 bp, Artificial Sequence
  Description of Artificial Sequence: Synthetic probe
cggcgacagtgtgcgtgtcacccag

SEQ ID NO: 4603 - DNA, 25 bp, Artificial Sequence
  Description of Artificial Sequence: Synthetic probe
ccctgtggtgggttaagtgcatacc

SEQ ID NO: 4604 - DNA, 25 bp, Artificial Sequence
  Description of Artificial Sequence: Synthetic probe
tggcccggtggtgtagtcagattac

SEQ ID NO: 4605 - DNA, 25 bp, Artificial Sequence
  Description of Artificial Sequence: Synthetic probe
gtaagtgtgtaggtgggtccatcct

SEQ ID NO: 4606 - DNA, 25 bp, Artificial Sequence
  Description of Artificial Sequence: Synthetic probe
gtgtcgtgttcggtggtggctttca

SEQ ID NO: 4607 - DNA, 25 bp, Artificial Sequence
  Description of Artificial Sequence: Synthetic probe
aacaatggtggtggtccggtagaca

SEQ ID NO: 4608 - DNA, 25 bp, Artificial Sequence
  Description of Artificial Sequence: Synthetic probe
cctccgacggtggtgacgaacccta

SEQ ID NO: 4609 - DNA, 25 bp, Artificial Sequence
  Description of Artificial Sequence: Synthetic probe
ccgttatgtgtggttggttactttc

SEQ ID NO: 4610 - DNA, 25 bp, Artificial Sequence
  Description of Artificial Sequence: Synthetic probe
acatggggtggtttgtctcttcgcc

SEQ ID NO: 4611 - DNA, 25 bp, Artificial Sequence
  Description of Artificial Sequence: Synthetic probe
atttgtggtggcgtagtgacgtaac

SEQ ID NO: 4612 - DNA, 25 bp, Artificial Sequence
  Description of Artificial Sequence: Synthetic probe
ccaagtcggtggtgtacatgtgcat

SEQ ID NO: 4613 - skipped

SEQ ID NO: 4614 - DNA, 25 bp, Artificial Sequence
  Description of Artificial Sequence: Synthetic probe
ggtcctgggtgggatacactatcct

SEQ ID NO: 4615 - skipped

SEQ ID NO: 4616 - DNA, 25 bp, Artificial Sequence
  Description of Artificial Sequence: Synthetic probe
acttggtggtggctctcgttaaaca

SEQ ID NO: 4617 - DNA, 25 bp, Artificial Sequence
  Description of Artificial Sequence: Synthetic probe
tttgctaggtggtggatcaggtata

SEQ ID NO: 4618 - DNA, 25 bp, Artificial Sequence
  Description of Artificial Sequence: Synthetic probe
actggttggtgggtcgaaacccttc

SEQ ID NO: 4619 - DNA, 25 bp, Artificial Sequence
  Description of Artificial Sequence: Synthetic probe
catttggtggtggtgtaatcgaatc

SEQ ID NO: 4620 - DNA, 25 bp, Artificial Sequence
  Description of Artificial Sequence: Synthetic probe
ctgttcaggtgctggtgaaaaacgc

SEQ ID NO: 4621 - DNA, 25 bp, Artificial Sequence
  Description of Artificial Sequence: Synthetic probe
acaccctaggtggtcgtgggttgtc

SEQ ID NO: 4622 - DNA, 25 bp, Artificial Sequence
  Description of Artificial Sequence: Synthetic probe
catgaggtgtgcgtgctacgcgctc

SEQ ID NO: 4623 - skipped

SEQ ID NO: 4624 - DNA, 25 bp, Artificial Sequence
  Description of Artificial Sequence: Synthetic probe
ttgtgtcgacggtgccgaacgccca

SEQ ID NO: 4625 - DNA, 25 bp, Artificial Sequence
  Description of Artificial Sequence: Synthetic probe
tggctccggtgcttgtgctacttca

SEQ ID NO: 4626 - DNA, 25 bp, Artificial Sequence
  Description of Artificial Sequence: Synthetic probe
actagatgtcggtgggtctattctc

SEQ ID NO: 4627 - DNA, 25 bp, Artificial Sequence
  Description of Artificial Sequence: Synthetic probe
cgagttgcggtggtgtttctctgca

SEQ ID NO: 4628 - DNA, 25 bp, Artificial Sequence
  Description of Artificial Sequence: Synthetic probe
agtgttcgtggtgctacggaatttt

SEQ ID NO: 4629 - DNA, 25 bp, Artificial Sequence
  Description of Artificial Sequence: Synthetic probe
gaacgttcgtggtgcttgttcgact

SEQ ID NO: 4630 - DNA, 25 bp, Artificial Sequence
  Description of Artificial Sequence: Synthetic probe
cctcggggtgcgtgcagacattgaa

SEQ ID NO: 4631 - DNA, 25 bp, Artificial Sequence
  Description of Artificial Sequence: Synthetic probe
cccgtgtggtgcacgagtgtcctga

SEQ ID NO: 4632 - DNA, 25 bp, Artificial Sequence
  Description of Artificial Sequence: Synthetic probe
ttatcgtgagtgtggatccaaggtt

SEQ ID NO: 4633 - DNA, 25 bp, Artificial Sequence
  Description of Artificial Sequence: Synthetic probe
ttccggtggtgcaacgatacggcct

SEQ ID NO: 4634 - DNA, 25 bp, Artificial Sequence
  Description of Artificial Sequence: Synthetic probe
cctggtggtgcttgtcggcacaccc

SEQ ID NO: 4635 - DNA, 25 bp, Artificial Sequence
  Description of Artificial Sequence: Synthetic probe
attcggtggtgcgactttcttcgag

SEQ ID NO: 4636 - DNA, 25 bp, Artificial Sequence
  Description of Artificial Sequence: Synthetic probe
gtcggcgacagtgtgcgtgtcaccc

SEQ ID NO: 4637 - DNA, 25 bp, Artificial Sequence
  Description of Artificial Sequence: Synthetic probe
ccctaaggtgacagtgttttgtatt

SEQ ID NO: 4638 - DNA, 25 bp, Artificial Sequence
  Description of Artificial Sequence: Synthetic probe
catactgagtgtgctgtggtcatca

SEQ ID NO: 4639 - DNA, 25 bp, Artificial Sequence
  Description of Artificial Sequence: Synthetic probe
tcaagtaaggtgacgtgcgtgactc

SEQ ID NO: 4640 - DNA, 25 bp, Artificial Sequence
  Description of Artificial Sequence: Synthetic probe
gcccggttcgtgtgcggcttgccct

SEQ ID NO: 4641 - DNA, 25 bp, Artificial Sequence
  Description of Artificial Sequence: Synthetic probe
cttgtcttgtgggtggaatcgagaa

SEQ ID NO: 4642 - DNA, 25 bp, Artificial Sequence
  Description of Artificial Sequence: Synthetic probe
acttagggtgtgggtgtcatgataa

SEQ ID NO: 4643 - DNA, 25 bp, Artificial Sequence
  Description of Artificial Sequence: Synthetic probe
gcatctgcgtgtggccgcagcctcg

SEQ ID NO: 4644 - DNA, 25 bp, Artificial Sequence
  Description of Artificial Sequence: Synthetic probe
cgcgtcggatgtgcgtggtcaaaga

SEQ ID NO: 4645 - DNA, 25 bp, Artificial Sequence
  Description of Artificial Sequence: Synthetic probe
ggtggagtgtgtgcctagtcaacac

SEQ ID NO: 4646 - DNA, 25 bp, Artificial Sequence
  Description of Artificial Sequence: Synthetic probe
cccagtgtgtggtttcacctccgag

SEQ ID NO: 4647 - DNA, 25 bp, Artificial Sequence
  Description of Artificial Sequence: Synthetic probe
cacatttgtggtggcgtgatactaa

SEQ ID NO: 4648 - DNA, 25 bp, Artificial Sequence
  Description of Artificial Sequence: Synthetic probe
aacatttgtggtggcgtgagtctcg

SEQ ID NO: 4649 - DNA, 25 bp, Artificial Sequence
  Description of Artificial Sequence: Synthetic probe
aacatttgtggggacgtgagtctag

SEQ ID NO: 4650 - DNA, 25 bp, Artificial Sequence
  Description of Artificial Sequence: Synthetic probe
gcggcgccgtgtgcgcgtggatgca

SEQ ID NO: 4651 - DNA, 25 bp, Artificial Sequence
  Description of Artificial Sequence: Synthetic probe
gtcgtgggttgtgcgtcattactct

SEQ ID NO: 4652 - DNA, 25 bp, Artificial Sequence
  Description of Artificial Sequence: Synthetic probe
cgtacccgttgtggtgtgacgaaca

SEQ ID NO: 4653 - DNA, 25 bp, Artificial Sequence
  Description of Artificial Sequence: Synthetic probe
ggcggtgtctgtgctccctccagga

SEQ ID NO: 4654 - DNA, 25 bp, Artificial Sequence
  Description of Artificial Sequence: Synthetic probe
ctccctgtgtgggtcgagacattcc

SEQ ID NO: 4655 - DNA, 25 bp, Artificial Sequence
  Description of Artificial Sequence: Synthetic probe
agtctccgttgtggtgcccgtccct

SEQ ID NO: 4656 - DNA, 25 bp, Artificial Sequence
  Description of Artificial Sequence: Synthetic probe
ggttgtttgtggtccgctactcgtc

SEQ ID NO: 4657 - DNA, 25 bp, Artificial Sequence
  Description of Artificial Sequence: Synthetic probe
tcgtttcgttgtggttgtcgaccga

SEQ ID NO: 4658 - DNA, 25 bp, Artificial Sequence
  Description of Artificial Sequence: Synthetic probe
cttctgttgtgcctgttggagagga

SEQ ID NO: 4659 - DNA, 25 bp, Artificial Sequence
  Description of Artificial Sequence: Synthetic probe
accctccgtgtggaatgtgtgctcg

SEQ ID NO: 4660 - DNA, 25 bp, Artificial Sequence
  Description of Artificial Sequence: Synthetic probe
ttcgtagcggtgtgggtgttaccaa

SEQ ID NO: 4661 - skipped

SEQ ID NO: 4662 - DNA, 25 bp, Artificial Sequence
  Description of Artificial Sequence: Synthetic probe
gtttatacgtgtgtgcctcccgcaa

SEQ ID NO: 4663 - DNA, 25 bp, Artificial Sequence
  Description of Artificial Sequence: Synthetic probe
acagtccggtgtgagtctggctaat

SEQ ID NO: 4664 - DNA, 25 bp, Artificial Sequence
  Description of Artificial Sequence: Synthetic probe
ccgtgtagagtgtggattcgtattt

SEQ ID NO: 4665 - DNA, 25 bp, Artificial Sequence
  Description of Artificial Sequence: Synthetic probe
acagtggtgtgtgacattttatggc

SEQ ID NO: 4666 - DNA, 25 bp, Artificial Sequence
  Description of Artificial Sequence: Synthetic probe
ttggtttgtgcgtccaagtcatccc

SEQ ID NO: 4667 - DNA, 25 bp, Artificial Sequence
  Description of Artificial Sequence: Synthetic probe
acatcgtggtgtgggtattattggt

SEQ ID NO: 4668 - DNA, 25 bp, Artificial Sequence
  Description of Artificial Sequence: Synthetic probe
ctccttgtgtggtagtgaggctcca

SEQ ID NO: 4669 - DNA, 25 bp, Artificial Sequence
  Description of Artificial Sequence: Synthetic probe
ccttgtgtgtggttactcctcgggt

SEQ ID NO: 4670 - DNA, 25 bp, Artificial Sequence
  Description of Artificial Sequence: Synthetic probe
gtacaacagtgtgtggtgtgccttc

SEQ ID NO: 4671 - DNA, 25 bp, Artificial Sequence
  Description of Artificial Sequence: Synthetic probe
cccgtggtgtggtgcgagcgaaccg

SEQ ID NO: 4672 - DNA, 25 bp, Artificial Sequence
  Description of Artificial Sequence: Synthetic probe
atatatgtgtgtgcggttagttccc

SEQ ID NO: 4673 - DNA, 25 bp, Artificial Sequence
  Description of Artificial Sequence: Synthetic probe
gggtaagtgtgtgctagagtgggta

SEQ ID NO: 4674 - DNA, 25 bp, Artificial Sequence
  Description of Artificial Sequence: Synthetic probe
cccgttgtgtggtgtcctatcaccc

SEQ ID NO: 4675 - DNA, 25 bp, Artificial Sequence
  Description of Artificial Sequence: Synthetic probe
agaggagtgtgtggtctgtcgagtg

SEQ ID NO: 4676 - DNA, 25 bp, Artificial Sequence
  Description of Artificial Sequence: Synthetic probe
acatagtcgtgtgtggttgaagtcg

SEQ ID NO: 4677 - DNA, 25 bp, Artificial Sequence
  Description of Artificial Sequence: Synthetic probe
tggtgtcttgtgagtaggtggtgtc

SEQ ID NO: 4678 - DNA, 25 bp, Artificial Sequence
  Description of Artificial Sequence: Synthetic probe
agaatttcgtggtgtagttggaatt

SEQ ID NO: 4679 - DNA, 25 bp, Artificial Sequence
  Description of Artificial Sequence: Synthetic probe
gcacctaggtgtgcgtgtcacccga

SEQ ID NO: 4680 - DNA, 25 bp, Artificial Sequence
  Description of Artificial Sequence: Synthetic probe
acgtgtttcgtgtgacgcatctagg

SEQ ID NO: 4681 - DNA, 25 bp, Artificial Sequence
  Description of Artificial Sequence: Synthetic probe
atattcctgtgacggtggttgttta

SEQ ID NO: 4682 - DNA, 25 bp, Artificial Sequence
  Description of Artificial Sequence: Synthetic probe
tttgtggtgtgacgtgaacttggtc

SEQ ID NO: 4683 - DNA, 25 bp, Artificial Sequence
  Description of Artificial Sequence: Synthetic probe
cccgacctgtgtgtgtcgaaggacg

SEQ ID NO: 4684 - DNA, 25 bp, Artificial Sequence
  Description of Artificial Sequence: Synthetic probe
cctctatgtgtgagtggaactaacc

SEQ ID NO: 4685 - DNA, 25 bp, Artificial Sequence
  Description of Artificial Sequence: Synthetic probe
aagtgtcgggtgttcaggaaaaact

SEQ ID NO: 4686 - DNA, 25 bp, Artificial Sequence
  Description of Artificial Sequence: Synthetic probe
atgcggtggtgtgaagtggaaatag

SEQ ID NO: 4687 - DNA, 25 bp, Artificial Sequence
  Description of Artificial Sequence: Synthetic probe
atgtgtccgtgtgaacgtgctgctc

SEQ ID NO: 4688 - DNA, 25 bp, Artificial Sequence
  Description of Artificial Sequence: Synthetic probe
acggtgttggtgtggatccctacga

SEQ ID NO: 4689 - DNA, 25 bp, Artificial Sequence
  Description of Artificial Sequence: Synthetic probe
aatacgctcggtgtgacggccaaac

SEQ ID NO: 4690 - DNA, 25 bp, Artificial Sequence
  Description of Artificial Sequence: Synthetic probe
acacatgtgtgtgatgactctaggt

SEQ ID NO: 4691 - DNA, 25 bp, Artificial Sequence
  Description of Artificial Sequence: Synthetic probe
ggtaacgtgtgtgtgtaaaaatatc

SEQ ID NO: 4692 - DNA, 25 bp, Artificial Sequence
  Description of Artificial Sequence: Synthetic probe
tccttgttgtgtgaagtcaacccga

SEQ ID NO: 4693 - DNA, 25 bp, Artificial Sequence
  Description of Artificial Sequence: Synthetic probe
gtcctctgtgtgtgaaagccctccg

SEQ ID NO: 4694 - DNA, 25 bp, Artificial Sequence
  Description of Artificial Sequence: Synthetic probe
agaaaaggtgtgtggttactgaaga

SEQ ID NO: 4695 - DNA, 25 bp, Artificial Sequence
  Description of Artificial Sequence: Synthetic probe
ccgagttgtgtgagtatcgacagaa

SEQ ID NO: 4696 - DNA, 25 bp, Artificial Sequence
  Description of Artificial Sequence: Synthetic probe
tttgcggtgtgataagtaccagacc

SEQ ID NO: 4697 - DNA, 25 bp, Artificial Sequence
  Description of Artificial Sequence: Synthetic probe
agtcggcgtgtgtgaccgagacacc

SEQ ID NO: 4698 - DNA, 25 bp, Artificial Sequence
  Description of Artificial Sequence: Synthetic probe
acgtgtagtctgtgtgagttccctc

SEQ ID NO: 4699 - DNA, 25 bp, Artificial Sequence
  Description of Artificial Sequence: Synthetic probe
attggtggtgtagcagaaaaacgtt

SEQ ID NO: 4700 - DNA, 25 bp, Artificial Sequence
  Description of Artificial Sequence: Synthetic probe
ccgtatcgagtgtgtaataacgtaa

SEQ ID NO: 4701-4702 - skipped (2 entries)

SEQ ID NO: 4703 - DNA, 25 bp, Artificial Sequence
  Description of Artificial Sequence: Synthetic probe
accgtcgtgtagtgtgacgtctcat

SEQ ID NO: 4704 - DNA, 25 bp, Artificial Sequence
  Description of Artificial Sequence: Synthetic probe
cgccagtggtgtgtggtccttcagt

SEQ ID NO: 4705 - DNA, 25 bp, Artificial Sequence
  Description of Artificial Sequence: Synthetic probe
ctttgtggtgtgtcttggttttgct

SEQ ID NO: 4706 - DNA, 25 bp, Artificial Sequence
  Description of Artificial Sequence: Synthetic probe
ctacttgtggtgtgactgttggacc

SEQ ID NO: 4707 - DNA, 25 bp, Artificial Sequence
  Description of Artificial Sequence: Synthetic probe
tacatatgggtgtgtctggtaatac

SEQ ID NO: 4708 - DNA, 25 bp, Artificial Sequence
  Description of Artificial Sequence: Synthetic probe
attgtgggtgtcatggatagaagta

SEQ ID NO: 4709 - DNA, 25 bp, Artificial Sequence
  Description of Artificial Sequence: Synthetic probe
cagggtggtgtgctttctcatcgaa

SEQ ID NO: 4710 - DNA, 25 bp, Artificial Sequence
  Description of Artificial Sequence: Synthetic probe
gcatggtggtgtgcattcactccca

SEQ ID NO: 4711 - DNA, 25 bp, Artificial Sequence
  Description of Artificial Sequence: Synthetic probe
atggtgggtgttttgtatcgtttgt

SEQ ID NO: 4712 - DNA, 25 bp, Artificial Sequence
  Description of Artificial Sequence: Synthetic probe
atctggggtgtgtgtaatagttcat

SEQ ID NO: 4713 - DNA, 25 bp, Artificial Sequence
  Description of Artificial Sequence: Synthetic probe
acttctgaggtgtggtgagtatgtc

SEQ ID NO: 4714 - DNA, 25 bp, Artificial Sequence
  Description of Artificial Sequence: Synthetic probe
ctaattggtgtttgtgctagtccag

SEQ ID NO: 4715 - DNA, 25 bp, Artificial Sequence
  Description of Artificial Sequence: Synthetic probe
aagtacccggtgtgtgaattcgcat

SEQ ID NO: 4716 - DNA, 25 bp, Artificial Sequence
  Description of Artificial Sequence: Synthetic probe
tgcctgggtgtctgtgctcgaacac

SEQ ID NO: 4717 - DNA, 25 bp, Artificial Sequence
  Description of Artificial Sequence: Synthetic probe
taccgtgtagggtgtgaacttacac

SEQ ID NO: 4718 - DNA, 25 bp, Artificial Sequence
  Description of Artificial Sequence: Synthetic probe
ggtccgaccggtgtcaccagtcaca

SEQ ID NO: 4719 - DNA, 25 bp, Artificial Sequence
  Description of Artificial Sequence: Synthetic probe
atatgagggtgtgcgttacataccc

SEQ ID NO: 4720 - DNA, 25 bp, Artificial Sequence
  Description of Artificial Sequence: Synthetic probe
cgtaggtcgaggtgtgctagtctct

SEQ ID NO: 4721 - DNA, 25 bp, Artificial Sequence
  Description of Artificial Sequence: Synthetic probe
ctacttgtggtgtgttctagacttc

SEQ ID NO: 4722 - DNA, 25 bp, Artificial Sequence
  Description of Artificial Sequence: Synthetic probe
agagcttggtgtccgtggcactcaa

SEQ ID NO: 4723 - DNA, 25 bp, Artificial Sequence
  Description of Artificial Sequence: Synthetic probe
aacttcgggtgtgtctcgacccact

SEQ ID NO: 4724 - DNA, 25 bp, Artificial Sequence
  Description of Artificial Sequence: Synthetic probe
tctatcagaggtgtgttgtgtgacc

SEQ ID NO: 4725 - DNA, 25 bp, Artificial Sequence
  Description of Artificial Sequence: Synthetic probe
ataacgtgggtgtagtaacggagtc

SEQ ID NO: 4726 - DNA, 25 bp, Artificial Sequence
  Description of Artificial Sequence: Synthetic probe
acctctgtcggtgtgctttagtcct

SEQ ID NO: 4727 - DNA, 25 bp, Artificial Sequence
  Description of Artificial Sequence: Synthetic probe
cgtgtgtctcggtgttgtcctcaac

SEQ ID NO: 4728 - DNA, 25 bp, Artificial Sequence
  Description of Artificial Sequence: Synthetic probe
gacgatcggtcggtgtgtccttcgt

SEQ ID NO: 4729 - DNA, 25 bp, Artificial Sequence
  Description of Artificial Sequence: Synthetic probe
cggtaagttgtgtccggtgggtaaa

SEQ ID NO: 4730 - DNA, 25 bp, Artificial Sequence
  Description of Artificial Sequence: Synthetic probe
gacccttggtgtcgttgttctgcta

SEQ ID NO: 4731 - DNA, 25 bp, Artificial Sequence
  Description of Artificial Sequence: Synthetic probe
aaccagcgtgtgtggaactgtcgtg

SEQ ID NO: 4732 - DNA, 25 bp, Artificial Sequence
  Description of Artificial Sequence: Synthetic probe
cttatacggtgtgtggtccctttca

SEQ ID NO: 4733 - DNA, 25 bp, Artificial Sequence
  Description of Artificial Sequence: Synthetic probe
caatagcgtgtgtgtagtcaaggtc

SEQ ID NO: 4734 - DNA, 25 bp, Artificial Sequence
  Description of Artificial Sequence: Synthetic probe
gaagaccttgtgtgttggcgttcac

SEQ ID NO: 4735 - DNA, 25 bp, Artificial Sequence
  Description of Artificial Sequence: Synthetic probe
attacacgggtgtagtatagtattt

SEQ ID NO: 4736 - DNA, 25 bp, Artificial Sequence
  Description of Artificial Sequence: Synthetic probe
acttctgctgtgtgcactggttccc

SEQ ID NO: 4737 - DNA, 25 bp, Artificial Sequence
  Description of Artificial Sequence: Synthetic probe
aatccgacggtgtcgtgtctcaggg

SEQ ID NO: 4738 - DNA, 25 bp, Artificial Sequence
  Description of Artificial Sequence: Synthetic probe
attctttgtgtggttgagcctggtc

SEQ ID NO: 4739 - DNA, 25 bp, Artificial Sequence
  Description of Artificial Sequence: Synthetic probe
gttccgttatgtgtggttggttact

SEQ ID NO: 4740 - DNA, 25 bp, Artificial Sequence
  Description of Artificial Sequence: Synthetic probe
ttaagacctgtgtgatggtgcaccg

SEQ ID NO: 4741 - DNA, 25 bp, Artificial Sequence
  Description of Artificial Sequence: Synthetic probe
acttgtttgtgtgtgtaaatattga

SEQ ID NO: 4742 - DNA, 25 bp, Artificial Sequence
  Description of Artificial Sequence: Synthetic probe
ctcgtgcttgtgtcaagagagatgg

SEQ ID NO: 4743 - DNA, 25 bp, Artificial Sequence
  Description of Artificial Sequence: Synthetic probe
acgagctcctgtgtgttatccgaca

SEQ ID NO: 4744 - DNA, 25 bp, Artificial Sequence
  Description of Artificial Sequence: Synthetic probe
acgtaaaagtgtgtggaaaaccctc

SEQ ID NO: 4745 - DNA, 25 bp, Artificial Sequence
  Description of Artificial Sequence: Synthetic probe
ctcttcttgtgtagtgaggatccca

SEQ ID NO: 4746 - DNA, 25 bp, Artificial Sequence
  Description of Artificial Sequence: Synthetic probe
ccttgtctgtgttgggtatgttggt

SEQ ID NO: 4747 - DNA, 25 bp, Artificial Sequence
  Description of Artificial Sequence: Synthetic probe
gcccgtgtcgtgtgttgctcagtga

SEQ ID NO: 4748 - DNA, 25 bp, Artificial Sequence
  Description of Artificial Sequence: Synthetic probe
tcttttgtgtgtcggagtggacatg

SEQ ID NO: 4749 - DNA, 25 bp, Artificial Sequence
  Description of Artificial Sequence: Synthetic probe
actcatccgtgtgtgtcggcaaccc

SEQ ID NO: 4750 - DNA, 25 bp, Artificial Sequence
  Description of Artificial Sequence: Synthetic probe
gttcggtttgtgttagagtcgtcct

SEQ ID NO: 4751 - DNA, 25 bp, Artificial Sequence
  Description of Artificial Sequence: Synthetic probe
gcatatagtactgtgtttgtggtct

SEQ ID NO: 4752 - DNA, 25 bp, Artificial Sequence
  Description of Artificial Sequence: Synthetic probe
ttgggtcgtgtgtagtgtatgtgtt

SEQ ID NO: 4753 - DNA, 25 bp, Artificial Sequence
  Description of Artificial Sequence: Synthetic probe
cggggatgtgtgtctcttctgctta

SEQ ID NO: 4754 - DNA, 25 bp, Artificial Sequence
  Description of Artificial Sequence: Synthetic probe
aactgtagtgtgtgtttccttactg

SEQ ID NO: 4755 - DNA, 25 bp, Artificial Sequence
  Description of Artificial Sequence: Synthetic probe
cgacgtattgtgtgtgataggtgca

SEQ ID NO: 4756 - DNA, 25 bp, Artificial Sequence
  Description of Artificial Sequence: Synthetic probe
tcacaccggtgtgtggtctcgggaa

SEQ ID NO: 4757 - DNA, 25 bp, Artificial Sequence
  Description of Artificial Sequence: Synthetic probe
gttcaaatgtgtgtccgtatcgtcg

SEQ ID NO: 4758 - DNA, 25 bp, Artificial Sequence
  Description of Artificial Sequence: Synthetic probe
gtataaggtatgtgtgtgtaaggta

SEQ ID NO: 4759 - DNA, 25 bp, Artificial Sequence
  Description of Artificial Sequence: Synthetic probe
ctatttctgtgtgcctcgtttcttg

SEQ ID NO: 4760 - DNA, 25 bp, Artificial Sequence
  Description of Artificial Sequence: Synthetic probe
acctcttgtgtgtggggactgaaaa

SEQ ID NO: 4761 - DNA, 25 bp, Artificial Sequence
  Description of Artificial Sequence: Synthetic probe
cgtgtcgtattgtgtgtagctcttt

SEQ ID NO: 4762 - DNA, 25 bp, Artificial Sequence
  Description of Artificial Sequence: Synthetic probe
atccttgtgtgtgtccatctgtcca

SEQ ID NO: 4763 - DNA, 25 bp, Artificial Sequence
  Description of Artificial Sequence: Synthetic probe
aagaacacgtgtgtctggtaaacgg

SEQ ID NO: 4764 - DNA, 25 bp, Artificial Sequence
  Description of Artificial Sequence: Synthetic probe
agaagggtgtgtcgggataaaatac

SEQ ID NO: 4765 - DNA, 25 bp, Artificial Sequence
  Description of Artificial Sequence: Synthetic probe
cgtctatacatgtgtgagtgtgtac

SEQ ID NO: 4766 - DNA, 25 bp, Artificial Sequence
  Description of Artificial Sequence: Synthetic probe
attacatgtgtgtgggtctttctct

SEQ ID NO: 4767 - DNA, 25 bp, Artificial Sequence
  Description of Artificial Sequence: Synthetic probe
ggttcagtctgtgtggtcgtacttt

SEQ ID NO: 4768 - DNA, 25 bp, Artificial Sequence
  Description of Artificial Sequence: Synthetic probe
actcgtgggtgtgtcgatgtctata

SEQ ID NO: 4769 - DNA, 25 bp, Artificial Sequence
  Description of Artificial Sequence: Synthetic probe
atcagaggtgtgttgtgtgacctcc

SEQ ID NO: 4770 - DNA, 25 bp, Artificial Sequence
  Description of Artificial Sequence: Synthetic probe
ctcgttggtgtgtatgcgtttgact

SEQ ID NO: 4771 - DNA, 25 bp, Artificial Sequence
  Description of Artificial Sequence: Synthetic probe
accaggtctgtgtgatcgatgttta

SEQ ID NO: 4772 - DNA, 25 bp, Artificial Sequence
  Description of Artificial Sequence: Synthetic probe
ctgcagttgtgtcgtagtgaaccac

SEQ ID NO: 4773 - DNA, 25 bp, Artificial Sequence
  Description of Artificial Sequence: Synthetic probe
ctcggtgcgtgtgttacgcgcacgt

SEQ ID NO: 4774 - DNA, 25 bp, Artificial Sequence
  Description of Artificial Sequence: Synthetic probe
aatcactctgtgtggtgctcgtccg

SEQ ID NO: 4775 - DNA, 25 bp, Artificial Sequence
  Description of Artificial Sequence: Synthetic probe
ctatgaagtgtgtgtacggagtcca

SEQ ID NO: 4776 - DNA, 25 bp, Artificial Sequence
  Description of Artificial Sequence: Synthetic probe
actttcagtgtgtacgattgggccg

SEQ ID NO: 4777 - DNA, 25 bp, Artificial Sequence
  Description of Artificial Sequence: Synthetic probe
agaacggcgtgtgtgacagaagtcc

SEQ ID NO: 4778 - DNA, 25 bp, Artificial Sequence
  Description of Artificial Sequence: Synthetic probe
gtcggtgtggtgtgtcctctacctc

SEQ ID NO: 4779 - DNA, 25 bp, Artificial Sequence
  Description of Artificial Sequence: Synthetic probe
gtatgtgtggtgtgtcacgtgtaca

SEQ ID NO: 4780 - DNA, 25 bp, Artificial Sequence
  Description of Artificial Sequence: Synthetic probe
atactcgctgtgtgtgaaccgttac

SEQ ID NO: 4781 - DNA, 25 bp, Artificial Sequence
  Description of Artificial Sequence: Synthetic probe
cgacccggtgtgtgaatcataacaa

SEQ ID NO: 4782 - DNA, 25 bp, Artificial Sequence
  Description of Artificial Sequence: Synthetic probe
aaatagtcgtgtgtgttttttgaca

SEQ ID NO: 4783 - DNA, 25 bp, Artificial Sequence
  Description of Artificial Sequence: Synthetic probe
cgttgcgtgtgtgtgtgacccatca

SEQ ID NO: 4784 - DNA, 25 bp, Artificial Sequence
  Description of Artificial Sequence: Synthetic probe
acaaatccgtggtgtcggtagaaag

SEQ ID NO: 4785 - DNA, 25 bp, Artificial Sequence
  Description of Artificial Sequence: Synthetic probe
ctaggctcagtggtgtggtttaaag

SEQ ID NO: 4786 - DNA, 25 bp, Artificial Sequence
  Description of Artificial Sequence: Synthetic probe
ctgtttgtgtgtcttgtctgtattg

SEQ ID NO: 4787 - DNA, 25 bp, Artificial Sequence
  Description of Artificial Sequence: Synthetic probe
ccgtgtagagtgtgtggacacactc

SEQ ID NO: 4788 - DNA, 25 bp, Artificial Sequence
  Description of Artificial Sequence: Synthetic probe
cgtacggtttgtgtataggtagact

SEQ ID NO: 4789 - DNA, 25 bp, Artificial Sequence
  Description of Artificial Sequence: Synthetic probe
actcgtggctgtgtagcatcgacca

SEQ ID NO: 4790 - DNA, 25 bp, Artificial Sequence
  Description of Artificial Sequence: Synthetic probe
cctacaagtgtgtgtggtaacaccg

SEQ ID NO: 4791 - DNA, 25 bp, Artificial Sequence
  Description of Artificial Sequence: Synthetic probe
gtgcttatacgtgtgtcgcttccca

SEQ ID NO: 4792 - DNA, 25 bp, Artificial Sequence
  Description of Artificial Sequence: Synthetic probe
attatgtcgtgtgttcggaagttcg

SEQ ID NO: 4793 - DNA, 25 bp, Artificial Sequence
  Description of Artificial Sequence: Synthetic probe
cccgtgtagtgtgtgcacttaaact

SEQ ID NO: 4794 - DNA, 25 bp, Artificial Sequence
  Description of Artificial Sequence: Synthetic probe
ctggatcgtgtgtgtttggttttga

SEQ ID NO: 4795 - DNA, 25 bp, Artificial Sequence
  Description of Artificial Sequence: Synthetic probe
aaattcgtgtgtgtcctggtactac

SEQ ID NO: 4796 - DNA, 25 bp, Artificial Sequence
  Description of Artificial Sequence: Synthetic probe
gacacctcgtcgtgtgtggtcggta

SEQ ID NO: 4797 - DNA, 25 bp, Artificial Sequence
  Description of Artificial Sequence: Synthetic probe
actgtgtagagtgtgtgcgtacgca

SEQ ID NO: 4798 - DNA, 25 bp, Artificial Sequence
  Description of Artificial Sequence: Synthetic probe
ccgtcgtgtagtgtgtgtattcgta

SEQ ID NO: 4799 - DNA, 25 bp, Artificial Sequence
  Description of Artificial Sequence: Synthetic probe
gtccacacgcgtgtgtgtcagtaga

SEQ ID NO: 4800 - DNA, 25 bp, Artificial Sequence
  Description of Artificial Sequence: Synthetic probe
atatttcgtgtgttgagtctttgtc

SEQ ID NO: 4801 - DNA, 25 bp, Artificial Sequence
  Description of Artificial Sequence: Synthetic probe
cttcttaagtggaaaaaagaacgac

SEQ ID NO: 4802 - DNA, 25 bp, Artificial Sequence
  Description of Artificial Sequence: Synthetic probe
atcttaccgtgtgtgtcgtcgaaca

SEQ ID NO: 4803 - DNA, 25 bp, Artificial Sequence
  Description of Artificial Sequence: Synthetic probe
aatactcgtgtgtgtgtctgcgcac

SEQ ID NO: 4804 - DNA, 25 bp, Artificial Sequence
  Description of Artificial Sequence: Synthetic probe
ccgtacagagtgtgtgtacgcactt

SEQ ID NO: 4805 - DNA, 25 bp, Artificial Sequence
  Description of Artificial Sequence: Synthetic probe
atatgctacgtgtgtggacccatct

SEQ ID NO: 4806 - DNA, 25 bp, Artificial Sequence
  Description of Artificial Sequence: Synthetic probe
acctgctgtgtgtcttctgacgccc

SEQ ID NO: 4807 - DNA, 25 bp, Artificial Sequence
  Description of Artificial Sequence: Synthetic probe
aacacgaccagtgcgttcgtccttt

SEQ ID NO: 4808 - DNA, 25 bp, Artificial Sequence
  Description of Artificial Sequence: Synthetic probe
tttgggtgtgtaagtatatatatgt

SEQ ID NO: 4809 - DNA, 25 bp, Artificial Sequence
  Description of Artificial Sequence: Synthetic probe
cgttcaggtgtgtagtaaggacaga

SEQ ID NO: 4810 - DNA, 25 bp, Artificial Sequence
  Description of Artificial Sequence: Synthetic probe
acccgaacagtggtagtggcacaac

SEQ ID NO: 4811 - DNA, 25 bp, Artificial Sequence
  Description of Artificial Sequence: Synthetic probe
cttatcgtcagtggtggtgttatac

SEQ ID NO: 4812 - DNA, 25 bp, Artificial Sequence
  Description of Artificial Sequence: Synthetic probe
atactcgttacagtggtcgtaggac

SEQ ID NO: 4813 - DNA, 25 bp, Artificial Sequence
  Description of Artificial Sequence: Synthetic probe
actcacgaccagtgcaggagagacg

SEQ ID NO: 4814 - DNA, 25 bp, Artificial Sequence
  Description of Artificial Sequence: Synthetic probe
agacatgtacgagtgctgtgacgtg

SEQ ID NO: 4815 - DNA, 25 bp, Artificial Sequence
  Description of Artificial Sequence: Synthetic probe
agtgacaaagtgatgagtcgtacct

SEQ ID NO: 4816 - DNA, 25 bp, Artificial Sequence
  Description of Artificial Sequence: Synthetic probe
gtgagtagagaagtgacgtgccata

SEQ ID NO: 4817 - DNA, 25 bp, Artificial Sequence
  Description of Artificial Sequence: Synthetic probe
tcattaagtagtggtggtgtgaact

SEQ ID NO: 4818 - DNA, 25 bp, Artificial Sequence
  Description of Artificial Sequence: Synthetic probe
tttacgggagtgtgacaatttgaac

SEQ ID NO: 4819 - DNA, 25 bp, Artificial Sequence
  Description of Artificial Sequence: Synthetic probe
ctgtgtgaagtgtgttaattgacct

SEQ ID NO: 4820 - DNA, 25 bp, Artificial Sequence
  Description of Artificial Sequence: Synthetic probe
taacatactgagtgtgctgtggtca

SEQ ID NO: 4821 - DNA, 25 bp, Artificial Sequence
  Description of Artificial Sequence: Synthetic probe
cctcgagtgagtgtgtcctattgta

SEQ ID NO: 4822 - DNA, 25 bp, Artificial Sequence
  Description of Artificial Sequence: Synthetic probe
tccaccgtgtagtgtgtgcgaggac

SEQ ID NO: 4823 - DNA, 25 bp, Artificial Sequence
  Description of Artificial Sequence: Synthetic probe
cccacgaagtgtgtgtgtcctacga

SEQ ID NO: 4824 - DNA, 25 bp, Artificial Sequence
  Description of Artificial Sequence: Synthetic probe
catgttgagtgtgcacgagtatttg

SEQ ID NO: 4825 - DNA, 25 bp, Artificial Sequence
  Description of Artificial Sequence: Synthetic probe
tccatatagagtgtgtacgtgcact

SEQ ID NO: 4826 - DNA, 25 bp, Artificial Sequence
  Description of Artificial Sequence: Synthetic probe
tattgttcgagtgtgtacgcgcact

SEQ ID NO: 4827 - DNA, 25 bp, Artificial Sequence
  Description of Artificial Sequence: Synthetic probe
cgtcggaatagtgtgagtgtgtcaa

SEQ ID NO: 4828 - DNA, 25 bp, Artificial Sequence
  Description of Artificial Sequence: Synthetic probe
cgttgacggagtgtgttctccctct

SEQ ID NO: 4829 - DNA, 25 bp, Artificial Sequence
  Description of Artificial Sequence: Synthetic probe
atcacggtgagtgtgagtacgcctc

SEQ ID NO: 4830 - DNA, 25 bp, Artificial Sequence
  Description of Artificial Sequence: Synthetic probe
gttcctctgtagtgtgtgcctacct

SEQ ID NO: 4831 - DNA, 25 bp, Artificial Sequence
  Description of Artificial Sequence: Synthetic probe
cccaacgagtgtgcgtgtacgactc

SEQ ID NO: 4832 - DNA, 25 bp, Artificial Sequence
  Description of Artificial Sequence: Synthetic probe
ttccgtcgtgtagtgtgtgtattcg

SEQ ID NO: 4833 - DNA, 25 bp, Artificial Sequence
  Description of Artificial Sequence: Synthetic probe
ccatgtgcgttgcaagtgtgtgtcg

SEQ ID NO: 4834 - DNA, 25 bp, Artificial Sequence
  Description of Artificial Sequence: Synthetic probe
tccgcgcggcgtgtgcgaaggccag

SEQ ID NO: 4835 - DNA, 25 bp, Artificial Sequence
  Description of Artificial Sequence: Synthetic probe
tcgtgtgtctccgttgccggcgtaa

SEQ ID NO: 4836 - DNA, 25 bp, Artificial Sequence
  Description of Artificial Sequence: Synthetic probe
gtgtgtgtgccgttccagtttttct

SEQ ID NO: 4837 - DNA, 25 bp, Artificial Sequence
  Description of Artificial Sequence: Synthetic probe
aatctcttcgtttggtgaccctata

SEQ ID NO: 4838 - DNA, 25 bp, Artificial Sequence
  Description of Artificial Sequence: Synthetic probe
ggacagagttcgttgtcgttgtctt

SEQ ID NO: 4839 - DNA, 25 bp, Artificial Sequence
  Description of Artificial Sequence: Synthetic probe
ccctggtcgttggttgtctgactcc

SEQ ID NO: 4840 - DNA, 25 bp, Artificial Sequence
  Description of Artificial Sequence: Synthetic probe
tcaattgtcgttgtttatcgagagt

SEQ ID NO: 4841 - DNA, 25 bp, Artificial Sequence
  Description of Artificial Sequence: Synthetic probe
agactatattcgttgtgtgctgtac

SEQ ID NO: 4842 - DNA, 25 bp, Artificial Sequence
  Description of Artificial Sequence: Synthetic probe
atatcgtttcgttgtggttgtcgac

SEQ ID NO: 4843 - DNA, 25 bp, Artificial Sequence
  Description of Artificial Sequence: Synthetic probe
atcaaagtcgttgctgtcgttgttg

SEQ ID NO: 4844 - DNA, 25 bp, Artificial Sequence
  Description of Artificial Sequence: Synthetic probe
atcaggtcgtcgttttctcggttac

SEQ ID NO: 4845 - DNA, 25 bp, Artificial Sequence
  Description of Artificial Sequence: Synthetic probe
tgtgtggtgtcgtttgtttttgtgt

SEQ ID NO: 4846 - DNA, 25 bp, Artificial Sequence
  Description of Artificial Sequence: Synthetic probe
atttctgacgttggtcggagcctca

SEQ ID NO: 4847 - DNA, 25 bp, Artificial Sequence
  Description of Artificial Sequence: Synthetic probe
cgacggaccacgttctaacgtgggt

SEQ ID NO: 4848 - DNA, 25 bp, Artificial Sequence
  Description of Artificial Sequence: Synthetic probe
gtgttagtgatacgttatgtgtgtg

SEQ ID NO: 4849 - DNA, 25 bp, Artificial Sequence
  Description of Artificial Sequence: Synthetic probe
ctcgacctcgacgttgtgtgacaga

SEQ ID NO: 4850 - DNA, 25 bp, Artificial Sequence
  Description of Artificial Sequence: Synthetic probe
agtgagtactcgtacgtttgggtta

SEQ ID NO: 4851 - DNA, 25 bp, Artificial Sequence
  Description of Artificial Sequence: Synthetic probe
ttcacacacacgttaccttttttac

SEQ ID NO: 4852 - DNA, 25 bp, Artificial Sequence
  Description of Artificial Sequence: Synthetic probe
agagttgccgtgggtttaaccgacg

SEQ ID NO: 4853 - DNA, 25 bp, Artificial Sequence
  Description of Artificial Sequence: Synthetic probe
tgttagtgatacgttatgtgtgtgt

SEQ ID NO: 4854 - DNA, 25 bp, Artificial Sequence
  Description of Artificial Sequence: Synthetic probe
gctcgacctcgacgttaagtgttat

SEQ ID NO: 4855 - DNA, 25 bp, Artificial Sequence
  Description of Artificial Sequence: Synthetic probe
ctcgactccgacgttaatagacttc

SEQ ID NO: 4856 - DNA, 25 bp, Artificial Sequence
  Description of Artificial Sequence: Synthetic probe
cttcggccgtgggtaacctggcccg

SEQ ID NO: 4857 - DNA, 25 bp, Artificial Sequence
  Description of Artificial Sequence: Synthetic probe
gtgcgcatgcgtgtgagtaaaaatc

SEQ ID NO: 4858 - DNA, 25 bp, Artificial Sequence
  Description of Artificial Sequence: Synthetic probe
ggtcgtggtgcgtgctaccgacaaa

SEQ ID NO: 4859 - DNA, 25 bp, Artificial Sequence
  Description of Artificial Sequence: Synthetic probe
accatcgccgtgcttcccttacgac

SEQ ID NO: 4860 - DNA, 25 bp, Artificial Sequence
  Description of Artificial Sequence: Synthetic probe
cctcgaggcgtggtgtaaggacctc

SEQ ID NO: 4861 - DNA, 25 bp, Artificial Sequence
  Description of Artificial Sequence: Synthetic probe
gttactccgccgtgatagatcggac

SEQ ID NO: 4862 - DNA, 25 bp, Artificial Sequence
  Description of Artificial Sequence: Synthetic probe
atttgccgtggtggagttttccgac

SEQ ID NO: 4863 - DNA, 25 bp, Artificial Sequence
  Description of Artificial Sequence: Synthetic probe
ccttgtccgtggtttttgtccttct

SEQ ID NO: 4864 - DNA, 25 bp, Artificial Sequence
  Description of Artificial Sequence: Synthetic probe
tactgaacgtgcgtgggcagaaccc

SEQ ID NO: 4865 - DNA, 25 bp, Artificial Sequence
  Description of Artificial Sequence: Synthetic probe
aaggagtgcgtgtcgttctgcgttt

SEQ ID NO: 4866 - DNA, 25 bp, Artificial Sequence
  Description of Artificial Sequence: Synthetic probe
tctttgtaccgtgggtggtcctcct

SEQ ID NO: 4867 - DNA, 25 bp, Artificial Sequence
  Description of Artificial Sequence: Synthetic probe
tcggtcgacccgtgcgtgtcagtac

SEQ ID NO: 4868 - DNA, 25 bp, Artificial Sequence
  Description of Artificial Sequence: Synthetic probe
gtcccgtcctcgtgaaaggttctag

SEQ ID NO: 4869 - DNA, 25 bp, Artificial Sequence
  Description of Artificial Sequence: Synthetic probe
acggtttatcgtgggtgtgacttta

SEQ ID NO: 4870 - DNA, 25 bp, Artificial Sequence
  Description of Artificial Sequence: Synthetic probe
ctactacggtgcgtgttaacccaaa

SEQ ID NO: 4871 - DNA, 25 bp, Artificial Sequence
  Description of Artificial Sequence: Synthetic probe
caaatctcgtggttggtgaagttct

SEQ ID NO: 4872 - DNA, 25 bp, Artificial Sequence
  Description of Artificial Sequence: Synthetic probe
agacttgtgcgtgtatatgagaacc

SEQ ID NO: 4873 - DNA, 25 bp, Artificial Sequence
  Description of Artificial Sequence: Synthetic probe
gcatctgaccgtgtgtgtacccata

SEQ ID NO: 4874 - DNA, 25 bp, Artificial Sequence
  Description of Artificial Sequence: Synthetic probe
cagattaccgtgtgtgtgccctcga

SEQ ID NO: 4875 - DNA, 25 bp, Artificial Sequence
  Description of Artificial Sequence: Synthetic probe
cgagagtctgcgtgtctgtaaagtc

SEQ ID NO: 4876 - DNA, 25 bp, Artificial Sequence
  Description of Artificial Sequence: Synthetic probe
cgcacgagccgtgtgtctgtctaaa

SEQ ID NO: 4877 - DNA, 25 bp, Artificial Sequence
  Description of Artificial Sequence: Synthetic probe
cttgatgcgtgtgcatctgtctggt

SEQ ID NO: 4878 - DNA, 25 bp, Artificial Sequence
  Description of Artificial Sequence: Synthetic probe
gtctcatctgcgtgtggctatctcc

SEQ ID NO: 4879 - DNA, 25 bp, Artificial Sequence
  Description of Artificial Sequence: Synthetic probe
agcctcgtccgtgtgagcgacggtc

SEQ ID NO: 4880 - DNA, 25 bp, Artificial Sequence
  Description of Artificial Sequence: Synthetic probe
acatgacccgtgtgggtgtaaagag

SEQ ID NO: 4881 - DNA, 25 bp, Artificial Sequence
  Description of Artificial Sequence: Synthetic probe
agaactgttcgtgttgtttgactac

SEQ ID NO: 4882 - DNA, 25 bp, Artificial Sequence
  Description of Artificial Sequence: Synthetic probe
agacttttcgtgtgggtcgttcagg

SEQ ID NO: 4883 - DNA, 25 bp, Artificial Sequence
  Description of Artificial Sequence: Synthetic probe
agccactgtacgtgtgtgagcgaca

SEQ ID NO: 4884 - DNA, 25 bp, Artificial Sequence
  Description of Artificial Sequence: Synthetic probe
tgtcgaagcgcgtgtgtgtcgttcc

SEQ ID NO: 4885 - DNA, 25 bp, Artificial Sequence
  Description of Artificial Sequence: Synthetic probe
acaccgtcctcgtgtttttcagaga

SEQ ID NO: 4886 - DNA, 25 bp, Artificial Sequence
  Description of Artificial Sequence: Synthetic probe
atgtggtgcgtgtactctacctccg

SEQ ID NO: 4887 - DNA, 25 bp, Artificial Sequence
  Description of Artificial Sequence: Synthetic probe
ctgctcgcgcgtgtgtccttcggac

SEQ ID NO: 4888 - DNA, 25 bp, Artificial Sequence
  Description of Artificial Sequence: Synthetic probe
atcaaaacgtgagaaaaaacaggtc

SEQ ID NO: 4889 - DNA, 25 bp, Artificial Sequence
  Description of Artificial Sequence: Synthetic probe
aaagtttcgtgtggttgacgagacc

SEQ ID NO: 4890 - DNA, 25 bp, Artificial Sequence
  Description of Artificial Sequence: Synthetic probe
gcgtcctaggtcgtgtgtgttccgc

SEQ ID NO: 4891 - DNA, 25 bp, Artificial Sequence
  Description of Artificial Sequence: Synthetic probe
acttagttactcgtgtcggtggtcc

SEQ ID NO: 4892 - DNA, 25 bp, Artificial Sequence
  Description of Artificial Sequence: Synthetic probe
gtacacgtgtgagcgtgtacgtgta

SEQ ID NO: 4893 - DNA, 25 bp, Artificial Sequence
  Description of Artificial Sequence: Synthetic probe
ccacacacacgtggcttccaggtgg

SEQ ID NO: 4894 - DNA, 25 bp, Artificial Sequence
  Description of Artificial Sequence: Synthetic probe
cattgcggtcggtgctaaaaagcat

SEQ ID NO: 4895 - DNA, 25 bp, Artificial Sequence
  Description of Artificial Sequence: Synthetic probe
gatgtgtgttcgtgtacacgtgtgt

SEQ ID NO: 4896 - DNA, 25 bp, Artificial Sequence
  Description of Artificial Sequence: Synthetic probe
aggtcggtcggtccgataaattccc

SEQ ID NO: 4897 - DNA, 25 bp, Artificial Sequence
  Description of Artificial Sequence: Synthetic probe
cgccgccggtcctcgcgggcgcccg

SEQ ID NO: 4898-4899 - skipped (2 entries)

SEQ ID NO: 4900 - DNA, 25 bp, Artificial Sequence
  Description of Artificial Sequence: Synthetic probe
caacggcggtcaagctccacgaggt

SEQ ID NO: 4901 - DNA, 25 bp, Artificial Sequence
  Description of Artificial Sequence: Synthetic probe
cactcgagaggtccgggaaccaaga

SEQ ID NO: 4902 - DNA, 25 bp, Artificial Sequence
  Description of Artificial Sequence: Synthetic probe
atgtggtggtcagtagtagtaacca

SEQ ID NO: 4903 - DNA, 25 bp, Artificial Sequence
  Description of Artificial Sequence: Synthetic probe
atgggtctgtcctctaagatggtgc

SEQ ID NO: 4904 - DNA, 25 bp, Artificial Sequence
  Description of Artificial Sequence: Synthetic probe
tgtcggtcggtgtccatgacgttcc

SEQ ID NO: 4905 - DNA, 25 bp, Artificial Sequence
  Description of Artificial Sequence: Synthetic probe
tcttcggtgtgtccgcttcggatca

SEQ ID NO: 4906 - DNA, 25 bp, Artificial Sequence
  Description of Artificial Sequence: Synthetic probe
agtgtgagtctgtcctttgtgtctg

SEQ ID NO: 4907 - DNA, 25 bp, Artificial Sequence
  Description of Artificial Sequence: Synthetic probe
gtcttcggtgtgtccgcttcggatc

SEQ ID NO: 4908 - DNA, 25 bp, Artificial Sequence
  Description of Artificial Sequence: Synthetic probe
gtaacacggtgtgtccgttactcgt

SEQ ID NO: 4909 - DNA, 25 bp, Artificial Sequence
  Description of Artificial Sequence: Synthetic probe
gtcggtcggttgtcatcatcatctt

SEQ ID NO: 4910 - DNA, 25 bp, Artificial Sequence
  Description of Artificial Sequence: Synthetic probe
gccgtggtggtcttcagtccttttc

SEQ ID NO: 4911 - DNA, 25 bp, Artificial Sequence
  Description of Artificial Sequence: Synthetic probe
gcgtccacctgtcacgaatgcgata

SEQ ID NO: 4912 - DNA, 25 bp, Artificial Sequence
  Description of Artificial Sequence: Synthetic probe
accggttggtcttggatctaatagt

SEQ ID NO: 4913 - DNA, 25 bp, Artificial Sequence
  Description of Artificial Sequence: Synthetic probe
tctcaggggtcttgtggatgaccag

SEQ ID NO: 4914 - DNA, 25 bp, Artificial Sequence
  Description of Artificial Sequence: Synthetic probe
tcgcgtacttgtgtcagtgggtgat

SEQ ID NO: 4915 - DNA, 25 bp, Artificial Sequence
  Description of Artificial Sequence: Synthetic probe
gtgtctctgggtctgcatcaaaaga

SEQ ID NO: 4916 - DNA, 25 bp, Artificial Sequence
  Description of Artificial Sequence: Synthetic probe
ggagtggtcggtctggtcaacttat

SEQ ID NO: 4917 - DNA, 25 bp, Artificial Sequence
  Description of Artificial Sequence: Synthetic probe
cgtgtaggtaggtcttaacagtccc

SEQ ID NO: 4918 - DNA, 25 bp, Artificial Sequence
  Description of Artificial Sequence: Synthetic probe
cttgataggtctgtgtgttccaaaa

SEQ ID NO: 4919 - DNA, 25 bp, Artificial Sequence
  Description of Artificial Sequence: Synthetic probe
gctaaggtcggtctgtctactcgcc

SEQ ID NO: 4920 - DNA, 25 bp, Artificial Sequence
  Description of Artificial Sequence: Synthetic probe
cggggtgtgtcttgagcatgtcctt

SEQ ID NO: 4921 - DNA, 25 bp, Artificial Sequence
  Description of Artificial Sequence: Synthetic probe
ctttatctgtcttgtgtgtaagtcc

SEQ ID NO: 4922 - DNA, 25 bp, Artificial Sequence
  Description of Artificial Sequence: Synthetic probe
ccagttactgtctgtggttcgccca

SEQ ID NO: 4923 - DNA, 25 bp, Artificial Sequence
  Description of Artificial Sequence: Synthetic probe
tacgttttcgtgtctgtgcagggac

SEQ ID NO: 4924 - DNA, 25 bp, Artificial Sequence
  Description of Artificial Sequence: Synthetic probe
ttttttgtctctgtcgaccctgtca

SEQ ID NO: 4925 - DNA, 25 bp, Artificial Sequence
  Description of Artificial Sequence: Synthetic probe
gtatatgctagtgtctgtgtgtggt

SEQ ID NO: 4926 - DNA, 25 bp, Artificial Sequence
  Description of Artificial Sequence: Synthetic probe
acatgtcttgtctctgggttctaca

SEQ ID NO: 4927 - DNA, 25 bp, Artificial Sequence
  Description of Artificial Sequence: Synthetic probe
acattcctgtctgtgtgggtgtctt

SEQ ID NO: 4928 - DNA, 25 bp, Artificial Sequence
  Description of Artificial Sequence: Synthetic probe
ctcttgtgtgtctgtagtgtagaag

SEQ ID NO: 4929 - DNA, 25 bp, Artificial Sequence
  Description of Artificial Sequence: Synthetic probe
ggtctctgtctgtctgcgtgcgtgt

SEQ ID NO: 4930 - DNA, 25 bp, Artificial Sequence
  Description of Artificial Sequence: Synthetic probe
cctctatgtgtctgggtctctgtga

SEQ ID NO: 4931 - DNA, 25 bp, Artificial Sequence
  Description of Artificial Sequence: Synthetic probe
ctactttgtgtctctgtcgttcaag

SEQ ID NO: 4932 - DNA, 25 bp, Artificial Sequence
  Description of Artificial Sequence: Synthetic probe
ctagggtgagtccttcttacgtggt

SEQ ID NO: 4933 - DNA, 25 bp, Artificial Sequence
  Description of Artificial Sequence: Synthetic probe
acgggtgtgagtcaagtgtccttct

SEQ ID NO: 4934 - DNA, 25 bp, Artificial Sequence
  Description of Artificial Sequence: Synthetic probe
cgccactctagtccgggtaccgtaa

SEQ ID NO: 4935 - DNA, 25 bp, Artificial Sequence
  Description of Artificial Sequence: Synthetic probe
ctatacaggtagtccaggtagacga

SEQ ID NO: 4936 - DNA, 25 bp, Artificial Sequence
  Description of Artificial Sequence: Synthetic probe
agggagagagtcacacacacagaga

SEQ ID NO: 4937 - DNA, 25 bp, Artificial Sequence
  Description of Artificial Sequence: Synthetic probe
gtaaaaaagtctcgaacaaacgtcc

SEQ ID NO: 4938 - DNA, 25 bp, Artificial Sequence
  Description of Artificial Sequence: Synthetic probe
atcaacatagtcttactcgtagtct

SEQ ID NO: 4939 - DNA, 25 bp, Artificial Sequence
  Description of Artificial Sequence: Synthetic probe
ttccgtgggtcgaagtcatagatca

SEQ ID NO: 4940 - DNA, 25 bp, Artificial Sequence
  Description of Artificial Sequence: Synthetic probe
tcacctcgccgtcggtctattgaga

SEQ ID NO: 4941 - DNA, 25 bp, Artificial Sequence
  Description of Artificial Sequence: Synthetic probe
tggtggtggtcgactactaagagaa

SEQ ID NO: 4942 - DNA, 25 bp, Artificial Sequence
  Description of Artificial Sequence: Synthetic probe
agactgagaggtcggtggttcttat

SEQ ID NO: 4943 - DNA, 25 bp, Artificial Sequence
  Description of Artificial Sequence: Synthetic probe
acttgtgggtcggactaaagtgtcc

SEQ ID NO: 4944 - DNA, 25 bp, Artificial Sequence
  Description of Artificial Sequence: Synthetic probe
acgtttctggtcgtgagatttccgg

SEQ ID NO: 4945 - DNA, 25 bp, Artificial Sequence
  Description of Artificial Sequence: Synthetic probe
gggtgtgagtgtcgccatcctcaaa

SEQ ID NO: 4946 - skipped

SEQ ID NO: 4947 - DNA, 25 bp, Artificial Sequence
  Description of Artificial Sequence: Synthetic probe
cctggtggtcggattggaccgtact

SEQ ID NO: 4948 - DNA, 25 bp, Artificial Sequence
  Description of Artificial Sequence: Synthetic probe
gtaacttgttgtcggtcgtgaattt

SEQ ID NO: 4949 - skipped

SEQ ID NO: 4950 - DNA, 25 bp, Artificial Sequence
  Description of Artificial Sequence: Synthetic probe
ctttttgtcggtgttgtctctcttg

SEQ ID NO: 4951 - skipped

SEQ ID NO: 4952 - DNA, 25 bp, Artificial Sequence
  Description of Artificial Sequence: Synthetic probe
ttcgcggtcggtcgtcactttcttt

SEQ ID NO: 4953 - DNA, 25 bp, Artificial Sequence
  Description of Artificial Sequence: Synthetic probe
gacgactctgagtgtcgggtgtccc

SEQ ID NO: 4954 - DNA, 25 bp, Artificial Sequence
  Description of Artificial Sequence: Synthetic probe
acacatctgtgtcggtgactcccta

SEQ ID NO: 4955 - DNA, 25 bp, Artificial Sequence
  Description of Artificial Sequence: Synthetic probe
actctgtgtgtgtcgccgaccctgg

SEQ ID NO: 4956 - DNA, 25 bp, Artificial Sequence
  Description of Artificial Sequence: Synthetic probe
agtctgtgtgtgtcgatctcccgag

SEQ ID NO: 4957 - DNA, 25 bp, Artificial Sequence
  Description of Artificial Sequence: Synthetic probe
aggtttcggtcgttgtagctagtcg

SEQ ID NO: 4958 - DNA, 25 bp, Artificial Sequence
  Description of Artificial Sequence: Synthetic probe
accgttggtgtcgttgtttctccta

SEQ ID NO: 4959 - DNA, 25 bp, Artificial Sequence
  Description of Artificial Sequence: Synthetic probe
ctgtcggtggtcgtttatgtgtcca

SEQ ID NO: 4960 - DNA, 25 bp, Artificial Sequence
  Description of Artificial Sequence: Synthetic probe
acctagtgtgtgtcgtatcatcgcc

SEQ ID NO: 4961 - DNA, 25 bp, Artificial Sequence
  Description of Artificial Sequence: Synthetic probe
ggtgtgtttgtcgtgtgtggtgtat

SEQ ID NO: 4962 - DNA, 25 bp, Artificial Sequence
  Description of Artificial Sequence: Synthetic probe
tgaagcgtgtgtcgtggtctccgac

SEQ ID NO: 4963 - DNA, 25 bp, Artificial Sequence
  Description of Artificial Sequence: Synthetic probe
atacatgtgtgtcgttgtacgtacc

SEQ ID NO: 4964 - DNA, 25 bp, Artificial Sequence
  Description of Artificial Sequence: Synthetic probe
actagtgttgtgtcgtgcagattgc

SEQ ID NO: 4965 - DNA, 25 bp, Artificial Sequence
  Description of Artificial Sequence: Synthetic probe
gactgtccgagtgtcgtgtctcacc

SEQ ID NO: 4966 - DNA, 25 bp, Artificial Sequence
  Description of Artificial Sequence: Synthetic probe
cgtccctcacgtcggtaaccatgtg

SEQ ID NO: 4967 - DNA, 25 bp, Artificial Sequence
  Description of Artificial Sequence: Synthetic probe
agacctgtccgtccattggttcagc

SEQ ID NO: 4968 - DNA, 25 bp, Artificial Sequence
  Description of Artificial Sequence: Synthetic probe
agggctccgtccctgcatccagtgt

SEQ ID NO: 4969 - DNA, 25 bp, Artificial Sequence
  Description of Artificial Sequence: Synthetic probe
atcctctaccgtccttgaggcaagg

SEQ ID NO: 4970 - DNA, 25 bp, Artificial Sequence
  Description of Artificial Sequence: Synthetic probe
catagacaccgtccgcctcaaggga

SEQ ID NO: 4971 - DNA, 25 bp, Artificial Sequence
  Description of Artificial Sequence: Synthetic probe
atcgttcgtgcgtccggaacaccca

SEQ ID NO: 4972 - DNA, 25 bp, Artificial Sequence
  Description of Artificial Sequence: Synthetic probe
aaggaaccgtccctcgtgtcaccgt

SEQ ID NO: 4973 - skipped

SEQ ID NO: 4974 - DNA, 25 bp, Artificial Sequence
  Description of Artificial Sequence: Synthetic probe
ctatccaccgtcttaagggaacatt

SEQ ID NO: 4975 - DNA, 25 bp, Artificial Sequence
  Description of Artificial Sequence: Synthetic probe
aataagaccgtcaagtgcgtgtgcc

SEQ ID NO: 4976 - DNA, 25 bp, Artificial Sequence
  Description of Artificial Sequence: Synthetic probe
gtgtctgttgtcgtcatcttgagta

SEQ ID NO: 4977 - DNA, 25 bp, Artificial Sequence
  Description of Artificial Sequence: Synthetic probe
cgggtgtgtcgtcacgttcaaggta

SEQ ID NO: 4978 - DNA, 25 bp, Artificial Sequence
  Description of Artificial Sequence: Synthetic probe
ccgtcactctcgtccaggtaggtga

SEQ ID NO: 4979 - DNA, 25 bp, Artificial Sequence
  Description of Artificial Sequence: Synthetic probe
gtcttctcctcgtccaacttcggtg

SEQ ID NO: 4980 - DNA, 25 bp, Artificial Sequence
  Description of Artificial Sequence: Synthetic probe
ggtgtcgtgttcgtcataaactgta

SEQ ID NO: 4981 - DNA, 25 bp, Artificial Sequence
  Description of Artificial Sequence: Synthetic probe
agcagtgtgcgtctggtgtcccaca

SEQ ID NO: 4982 - DNA, 25 bp, Artificial Sequence
  Description of Artificial Sequence: Synthetic probe
tcgtgtggtgtcgtctcacattgat

SEQ ID NO: 4983 - DNA, 25 bp, Artificial Sequence
  Description of Artificial Sequence: Synthetic probe
agtcactcccgtctccatgtcttgg

SEQ ID NO: 4984 - DNA, 25 bp, Artificial Sequence
  Description of Artificial Sequence: Synthetic probe
ggcgacccacgtcctcattctgcag

SEQ ID NO: 4985 - DNA, 25 bp, Artificial Sequence
  Description of Artificial Sequence: Synthetic probe
tatacacacacacgtccaggacctg

SEQ ID NO: 4986 - DNA, 25 bp, Artificial Sequence
  Description of Artificial Sequence: Synthetic probe
cgtagtttaacgtcgttgtgctctt

SEQ ID NO: 4987 - DNA, 25 bp, Artificial Sequence
  Description of Artificial Sequence: Synthetic probe
agaacccgtcgtcgctactatttga

SEQ ID NO: 4988 - DNA, 25 bp, Artificial Sequence
  Description of Artificial Sequence: Synthetic probe
cacacacacacgtccatgtatatgt

SEQ ID NO: 4989 - DNA, 25 bp, Artificial Sequence
  Description of Artificial Sequence: Synthetic probe
ctcccgtaacgtcgttggtgtggac

SEQ ID NO: 4990 - DNA, 25 bp, Artificial Sequence
  Description of Artificial Sequence: Synthetic probe
cgacgaccaccgtcggcaccagtac

SEQ ID NO: 4991 - DNA, 25 bp, Artificial Sequence
  Description of Artificial Sequence: Synthetic probe
gtggattccgtcgttcaatgcagtg

SEQ ID NO: 4992 - DNA, 25 bp, Artificial Sequence
  Description of Artificial Sequence: Synthetic probe
atgactctacacgtctcctgtctgt

SEQ ID NO: 4993 - DNA, 25 bp, Artificial Sequence
  Description of Artificial Sequence: Synthetic probe
gttatccggacgtctcagtatcagt

SEQ ID NO: 4994 - DNA, 25 bp, Artificial Sequence
  Description of Artificial Sequence: Synthetic probe
ccagaaacgtcgcacgtgtgtgtcg

SEQ ID NO: 4995 - DNA, 25 bp, Artificial Sequence
  Description of Artificial Sequence: Synthetic probe
aagtcatcttaacccaacgttaggt

SEQ ID NO: 4996 - skipped

SEQ ID NO: 4997 - DNA, 25 bp, Artificial Sequence
  Description of Artificial Sequence: Synthetic probe
acgaaggacttaacctagaggttta

SEQ ID NO: 4998 - DNA, 25 bp, Artificial Sequence
  Description of Artificial Sequence: Synthetic probe
actgttccgttatgtgtggttggtt

SEQ ID NO: 4999 - DNA, 25 bp, Artificial Sequence
  Description of Artificial Sequence: Synthetic probe
tatgtatggttatgtgtggtgatgt

SEQ ID NO: 5000 - DNA, 25 bp, Artificial Sequence
  Description of Artificial Sequence: Synthetic probe
agaaccgtttatccactctcttgat

SEQ ID NO: 5001 - DNA, 25 bp, Artificial Sequence
  Description of Artificial Sequence: Synthetic probe
gttagtgatacgttatgtgtgtgta

SEQ ID NO: 5002 - DNA, 25 bp, Artificial Sequence
  Description of Artificial Sequence: Synthetic probe
agaaatcatattaaaaaacttgact

SEQ ID NO: 5003 - DNA, 25 bp, Artificial Sequence
  Description of Artificial Sequence: Synthetic probe
ccgatgtagttattcgtgtgtggtc

SEQ ID NO: 5004 - DNA, 25 bp, Artificial Sequence
  Description of Artificial Sequence: Synthetic probe
aggtgtgtgtataatgagtatcaaa

SEQ ID NO: 5005 - DNA, 25 bp, Artificial Sequence
  Description of Artificial Sequence: Synthetic probe
acggtggtcgatatgtgtgatggtt

SEQ ID NO: 5006 - DNA, 25 bp, Artificial Sequence
  Description of Artificial Sequence: Synthetic probe
aaaaaatataacagagtcatactga

SEQ ID NO: 5007 - DNA, 25 bp, Artificial Sequence
  Description of Artificial Sequence: Synthetic probe
acacggacacatatacgcttagagt

SEQ ID NO: 5008 - DNA, 25 bp, Artificial Sequence
  Description of Artificial Sequence: Synthetic probe
gtatatgttttaggtgtgtgtactt

SEQ ID NO: 5009 - DNA, 25 bp, Artificial Sequence
  Description of Artificial Sequence: Synthetic probe
acctaactttaggtcggtcgggtcc

SEQ ID NO: 5010 - DNA, 25 bp, Artificial Sequence
  Description of Artificial Sequence: Synthetic probe
aacgactgattagactagaggcgtc

SEQ ID NO: 5011 - DNA, 25 bp, Artificial Sequence
  Description of Artificial Sequence: Synthetic probe
ctacgaggtgttagaccagactcca

SEQ ID NO: 5012 - DNA, 25 bp, Artificial Sequence
  Description of Artificial Sequence: Synthetic probe
ctgagtactacttagaaggcactac

SEQ ID NO: 5013 - DNA, 25 bp, Artificial Sequence
  Description of Artificial Sequence: Synthetic probe
cagtatcctgtagtggtggtcatcc

SEQ ID NO: 5014 - DNA, 25 bp, Artificial Sequence
  Description of Artificial Sequence: Synthetic probe
atgtgtcacttagtgtgtgtctttg

SEQ ID NO: 5015 - DNA, 25 bp, Artificial Sequence
  Description of Artificial Sequence: Synthetic probe
ctttagcgttagttgtcgtggtcat

SEQ ID NO: 5016 - DNA, 25 bp, Artificial Sequence
  Description of Artificial Sequence: Synthetic probe
gactccgacgtgatagcgtgcccag

SEQ ID NO: 5017 - DNA, 25 bp, Artificial Sequence
  Description of Artificial Sequence: Synthetic probe
tcctaccggatagagtgtgtactta

SEQ ID NO: 5018 - DNA, 25 bp, Artificial Sequence
  Description of Artificial Sequence: Synthetic probe
agtttccctaatgctatgacgccgt

SEQ ID NO: 5019 - DNA, 25 bp, Artificial Sequence
  Description of Artificial Sequence: Synthetic probe
attgttcctaactcatcccgtgtag

SEQ ID NO: 5020 - DNA, 25 bp, Artificial Sequence
  Description of Artificial Sequence: Synthetic probe
gtgttcggctctaatctagttagtc

SEQ ID NO: 5021 - DNA, 25 bp, Artificial Sequence
  Description of Artificial Sequence: Synthetic probe
gtactccctctctaaccttgtgagc

SEQ ID NO: 5022 - DNA, 25 bp, Artificial Sequence
  Description of Artificial Sequence: Synthetic probe
acccgacacctatcggaaggcgcta

SEQ ID NO: 5023 - DNA, 25 bp, Artificial Sequence
  Description of Artificial Sequence: Synthetic probe
gtcactcctacctattctacagaag

SEQ ID NO: 5024 - DNA, 25 bp, Artificial Sequence
  Description of Artificial Sequence: Synthetic probe
cctcgcgcgctattgcgtgcgtacc

SEQ ID NO: 5025 - DNA, 25 bp, Artificial Sequence
  Description of Artificial Sequence: Synthetic probe
atcgccgcctatccgagtgtccggt

SEQ ID NO: 5026 - DNA, 25 bp, Artificial Sequence
  Description of Artificial Sequence: Synthetic probe
gtacagaccggctatgacaaaggcg

SEQ ID NO: 5027 - DNA, 25 bp, Artificial Sequence
  Description of Artificial Sequence: Synthetic probe
ggtctagggctatacgaaacgtccg

SEQ ID NO: 5028 - DNA, 25 bp, Artificial Sequence
  Description of Artificial Sequence: Synthetic probe
ctattcttctatgtgtgggtgttac

SEQ ID NO: 5029 - DNA, 25 bp, Artificial Sequence
  Description of Artificial Sequence: Synthetic probe
cacacgcacactaatccgaaggggt

SEQ ID NO: 5030 - DNA, 25 bp, Artificial Sequence
  Description of Artificial Sequence: Synthetic probe
agttcccactatctactcccagtag

SEQ ID NO: 5031 - DNA, 25 bp, Artificial Sequence
  Description of Artificial Sequence: Synthetic probe
ttcaactctactatagtaaatgccc

SEQ ID NO: 5032 - DNA, 25 bp, Artificial Sequence
  Description of Artificial Sequence: Synthetic probe
actacaaacctagggactcgtggga

SEQ ID NO: 5033 - DNA, 25 bp, Artificial Sequence
  Description of Artificial Sequence: Synthetic probe
cttggcctagaagaccagtaacacc

SEQ ID NO: 5034 - DNA, 25 bp, Artificial Sequence
  Description of Artificial Sequence: Synthetic probe
ccgagaacctagtgtgtgtctgttt

SEQ ID NO: 5035 - DNA, 25 bp, Artificial Sequence
  Description of Artificial Sequence: Synthetic probe
cccactacgctagttccgtgtgtgt

SEQ ID NO: 5036 - skipped

SEQ ID NO: 5037 - DNA, 25 bp, Artificial Sequence
  Description of Artificial Sequence: Synthetic probe
cgttactccatactggatctcaatt

SEQ ID NO: 5038 - DNA, 25 bp, Artificial Sequence
  Description of Artificial Sequence: Synthetic probe
tcacacacacgttaccttttttaca

SEQ ID NO: 5039 - DNA, 25 bp, Artificial Sequence
  Description of Artificial Sequence: Synthetic probe
gtctacccattacacgactgcagta

SEQ ID NO: 5040 - DNA, 25 bp, Artificial Sequence
  Description of Artificial Sequence: Synthetic probe
taatatcattactgtgtgtcggttc

SEQ ID NO: 5041 - DNA, 25 bp, Artificial Sequence
  Description of Artificial Sequence: Synthetic probe
acaatgtacttacttggtctgttga

SEQ ID NO: 5042 - DNA, 25 bp, Artificial Sequence
  Description of Artificial Sequence: Synthetic probe
gtgtgtggtcttactaggtctctgg

SEQ ID NO: 5043 - DNA, 25 bp, Artificial Sequence
  Description of Artificial Sequence: Synthetic probe
gtgtgtgcgcatacctctgaactac

SEQ ID NO: 5044 - DNA, 25 bp, Artificial Sequence
  Description of Artificial Sequence: Synthetic probe
acaccacacatacatgtaccacgga

SEQ ID NO: 5045 - DNA, 25 bp, Artificial Sequence
  Description of Artificial Sequence: Synthetic probe
gttgacccataccaagtctagacgt

SEQ ID NO: 5046 - DNA, 25 bp, Artificial Sequence
  Description of Artificial Sequence: Synthetic probe
ccgtatcttatacctgtggtggaac

SEQ ID NO: 5047 - DNA, 25 bp, Artificial Sequence
  Description of Artificial Sequence: Synthetic probe
gtggaactgctacaggcgcccaccg

SEQ ID NO: 5048 - DNA, 25 bp, Artificial Sequence
  Description of Artificial Sequence: Synthetic probe
cctgtacggctacaaaagtctttgt

SEQ ID NO: 5049 - DNA, 25 bp, Artificial Sequence
  Description of Artificial Sequence: Synthetic probe
gacctctgtctctacacccggtagt

SEQ ID NO: 5050 - DNA, 25 bp, Artificial Sequence
  Description of Artificial Sequence: Synthetic probe
aacacacacctactgacgtgtgagt

SEQ ID NO: 5051 - DNA, 25 bp, Artificial Sequence
  Description of Artificial Sequence: Synthetic probe
atttagcactacgtcatttcggatg

SEQ ID NO: 5052 - DNA, 25 bp, Artificial Sequence
  Description of Artificial Sequence: Synthetic probe
ctgaacgacgactacactgcgaacg

SEQ ID NO: 5053 - DNA, 25 bp, Artificial Sequence
  Description of Artificial Sequence: Synthetic probe
agaacgccgactacgacgccttgag

SEQ ID NO: 5054 - DNA, 25 bp, Artificial Sequence
  Description of Artificial Sequence: Synthetic probe
cgtcacacacggtaatgaaaattta

SEQ ID NO: 5055 - DNA, 25 bp, Artificial Sequence
  Description of Artificial Sequence: Synthetic probe
gacaggtgtggtatttttgaggacc

SEQ ID NO: 5056 - DNA, 25 bp, Artificial Sequence
  Description of Artificial Sequence: Synthetic probe
gtctcgttgtgtgtaaaggatctcc

SEQ ID NO: 5057 - DNA, 25 bp, Artificial Sequence
  Description of Artificial Sequence: Synthetic probe
agtgagcgtgtgtatgacggtatat

SEQ ID NO: 5058 - DNA, 25 bp, Artificial Sequence
  Description of Artificial Sequence: Synthetic probe
aggtcggtcgtgtaacgtcacaagt

SEQ ID NO: 5059 - DNA, 25 bp, Artificial Sequence
  Description of Artificial Sequence: Synthetic probe
gtgtggtgaagtaacgagaaccttc

SEQ ID NO: 5060 - DNA, 25 bp, Artificial Sequence
  Description of Artificial Sequence: Synthetic probe
atctctttagtaacgtgcgtgcctc

SEQ ID NO: 5061 - DNA, 25 bp, Artificial Sequence
  Description of Artificial Sequence: Synthetic probe
acggacggtgagtaaagtaatcaaa

SEQ ID NO: 5062 - DNA, 25 bp, Artificial Sequence
  Description of Artificial Sequence: Synthetic probe
ttgggtaggtagctgggtaactctc

SEQ ID NO: 5063 - DNA, 25 bp, Artificial Sequence
  Description of Artificial Sequence: Synthetic probe
gttttctgagtatgcggtggtcatc

SEQ ID NO: 5064 - DNA, 25 bp, Artificial Sequence
  Description of Artificial Sequence: Synthetic probe
aggatgtcggtaggtcgtttgtaaa

SEQ ID NO: 5065 - DNA, 25 bp, Artificial Sequence
  Description of Artificial Sequence: Synthetic probe
tatatagagggtaggttcacgattg

SEQ ID NO: 5066 - DNA, 25 bp, Artificial Sequence
  Description of Artificial Sequence: Synthetic probe
agtatcgttacggtaggtaggtctg

SEQ ID NO: 5067 - DNA, 25 bp, Artificial Sequence
  Description of Artificial Sequence: Synthetic probe
agtcagtttgtaggtgtgttatgtc

SEQ ID NO: 5068 - DNA, 25 bp, Artificial Sequence
  Description of Artificial Sequence: Synthetic probe
ttccggtgtgtaggttttgctgttc

SEQ ID NO: 5069 - DNA, 25 bp, Artificial Sequence
  Description of Artificial Sequence: Synthetic probe
acagaccttgtagtggtggcgtaca

SEQ ID NO: 5070 - DNA, 25 bp, Artificial Sequence
  Description of Artificial Sequence: Synthetic probe
gaacaagtgtgtaggtgaggaagtg

SEQ ID NO: 5071 - skipped

SEQ ID NO: 5072 - DNA, 25 bp, Artificial Sequence
  Description of Artificial Sequence: Synthetic probe
tgggtcgtgtgtagtgtatgtgttg

SEQ ID NO: 5073 - DNA, 25 bp, Artificial Sequence
  Description of Artificial Sequence: Synthetic probe
aacctgtggtagtcgtgtttcactc

SEQ ID NO: 5074 - DNA, 25 bp, Artificial Sequence
  Description of Artificial Sequence: Synthetic probe
atcagagtaggtagttcccgtatcc

SEQ ID NO: 5075 - DNA, 25 bp, Artificial Sequence
  Description of Artificial Sequence: Synthetic probe
acagagttctgtagactttgtccgt

SEQ ID NO: 5076 - DNA, 25 bp, Artificial Sequence
  Description of Artificial Sequence: Synthetic probe
tccttatgtgtagtggtggaggcac

SEQ ID NO: 5077 - DNA, 25 bp, Artificial Sequence
  Description of Artificial Sequence: Synthetic probe
acctttgtgtagtgtgtgaggagtc

SEQ ID NO: 5078 - DNA, 25 bp, Artificial Sequence
  Description of Artificial Sequence: Synthetic probe
ggtttttagtagttctgtccggacc

SEQ ID NO: 5079 - DNA, 25 bp, Artificial Sequence
  Description of Artificial Sequence: Synthetic probe
ttgtttgtgtagacgttgcccaact

SEQ ID NO: 5080 - DNA, 25 bp, Artificial Sequence
  Description of Artificial Sequence: Synthetic probe
cgtcagtgtgagtagaaaggatttc

SEQ ID NO: 5081 - DNA, 25 bp, Artificial Sequence
  Description of Artificial Sequence: Synthetic probe
ccgtacgtggtgtagtgtgttcagc

SEQ ID NO: 5082 - DNA, 25 bp, Artificial Sequence
  Description of Artificial Sequence: Synthetic probe
agttcctctgtagtgtgtgcctacc

SEQ ID NO: 5083 - DNA, 25 bp, Artificial Sequence
  Description of Artificial Sequence: Synthetic probe
ccgtcctgtgtagtggtcctgacta

SEQ ID NO: 5084 - DNA, 25 bp, Artificial Sequence
  Description of Artificial Sequence: Synthetic probe
cgcacaaagtagcaccgacgacaga

SEQ ID NO: 5085 - DNA, 25 bp, Artificial Sequence
  Description of Artificial Sequence: Synthetic probe
ctactcccagtagtgacgcgtttcg

SEQ ID NO: 5086 - DNA, 25 bp, Artificial Sequence
  Description of Artificial Sequence: Synthetic probe
tgactagagagagtaggtgagtatc

SEQ ID NO: 5087 - DNA, 25 bp, Artificial Sequence
  Description of Artificial Sequence: Synthetic probe
cttgtgactcgtatctgtatcggag

SEQ ID NO: 5088 - DNA, 25 bp, Artificial Sequence
  Description of Artificial Sequence: Synthetic probe
acactaccttcgtattggacagagt

SEQ ID NO: 5089 - DNA, 25 bp, Artificial Sequence
  Description of Artificial Sequence: Synthetic probe
acatcacacacgtatcaccacacac

SEQ ID NO: 5090 - DNA, 25 bp, Artificial Sequence
  Description of Artificial Sequence: Synthetic probe
gttcccaccgtatagagtgtgtgga

SEQ ID NO: 5091 - DNA, 25 bp, Artificial Sequence
  Description of Artificial Sequence: Synthetic probe
cggacactagtcgtatacagggtat

SEQ ID NO: 5092 - DNA, 25 bp, Artificial Sequence
  Description of Artificial Sequence: Synthetic probe
caatcggtcgtagtgtgttcctctc

SEQ ID NO: 5093 - DNA, 25 bp, Artificial Sequence
  Description of Artificial Sequence: Synthetic probe
ggaccgagacgacgtaaacccggac

SEQ ID NO: 5094 - DNA, 25 bp, Artificial Sequence
  Description of Artificial Sequence: Synthetic probe
agtgggtaccgtagtagttaccgta

SEQ ID NO: 5095 - DNA, 25 bp, Artificial Sequence
  Description of Artificial Sequence: Synthetic probe
ccgttgtgtgtacgtcattcggaaa

SEQ ID NO: 5096 - DNA, 25 bp, Artificial Sequence
  Description of Artificial Sequence: Synthetic probe
gtgtggagtgtgtacccgaactcgt

SEQ ID NO: 5097 - DNA, 25 bp, Artificial Sequence
  Description of Artificial Sequence: Synthetic probe
gtgtagaatgtgtactccactttgg

SEQ ID NO: 5098 - DNA, 25 bp, Artificial Sequence
  Description of Artificial Sequence: Synthetic probe
tttggtacagtacactttcgtgacc

SEQ ID NO: 5099 - DNA, 25 bp, Artificial Sequence
  Description of Artificial Sequence: Synthetic probe
atgtgtcgggtacgttactcgtgta

SEQ ID NO: 5100 - DNA, 25 bp, Artificial Sequence
  Description of Artificial Sequence: Synthetic probe
acgggcgagacgtaccgacgacacg

SEQ ID NO: 5101 - DNA, 25 bp, Artificial Sequence
  Description of Artificial Sequence: Synthetic probe
cgaccaccgacgtactttaggaatt

SEQ ID NO: 5102 - DNA, 25 bp, Artificial Sequence
  Description of Artificial Sequence: Synthetic probe
attggacacgtacgagtgtgtcggc

SEQ ID NO: 5103 - DNA, 25 bp, Artificial Sequence
  Description of Artificial Sequence: Synthetic probe
tgaagtgtgtgtacggagtccaccc

SEQ ID NO: 5104 - DNA, 25 bp, Homo sapiens
tagtctccgtcaattctaggttaca

SEQ ID NO: 5105 - DNA, 25 bp, Homo sapiens
ttcatatctgcggggcagagacgga

SEQ ID NO: 5106 - DNA, 25 bp, Homo sapiens
gaaatagggtaaaagctgcacgggc

SEQ ID NO: 5107 - DNA, 25 bp, Homo sapiens
gactctgagggtcatgcgcctagca

SEQ ID NO: 5108 - DNA, 25 bp, Homo sapiens
tgagagaacggtcagcttggagcac

SEQ ID NO: 5109 - DNA, 25 bp, Homo sapiens
gcacatttagggtggcatggcctct

SEQ ID NO: 5110 - DNA, 25 bp, Homo sapiens
tccgtgtgagggttcaaggccaagc

SEQ ID NO: 5111 - DNA, 25 bp, Homo sapiens
tccggacagggttgaggtagctctc

SEQ ID NO: 5112 - DNA, 25 bp, Homo sapiens
tcacggacagggatagaggtttgcc

SEQ ID NO: 5113 - DNA, 25 bp, Homo sapiens
gacaagagcagggagccacatcctg

SEQ ID NO: 5114 - DNA, 25 bp, Homo sapiens
aggccttaggtcttctattgtcaga

SEQ ID NO: 5115 - DNA, 25 bp, Homo sapiens
caatgccaaaggtcagtctaggtcc

SEQ ID NO: 5116 - DNA, 25 bp, Homo sapiens
tggtatgaaggtgctggccacagcc

SEQ ID NO: 5117 - DNA, 25 bp, Homo sapiens
ggcggcagcaggttaaggacacttt

SEQ ID NO: 5118 - DNA, 25 bp, Homo sapiens
catattactgggaataaatgaggtc

SEQ ID NO: 5119 - DNA, 25 bp, Homo sapiens
tcagatgccagggaggataaagcag

SEQ ID NO: 5120 - DNA, 25 bp, Homo sapiens
gatgttgagggagcacatttgtgtt

SEQ ID NO: 5121 - DNA, 25 bp, Homo sapiens
tgctgacaagggagaatcaccacag

SEQ ID NO: 5122 - DNA, 25 bp, Homo sapiens
tgcagccactgggattcagcttccc

SEQ ID NO: 5123 - DNA, 25 bp, Homo sapiens
tgttctctaggactgggagaagctg

SEQ ID NO: 5124 - DNA, 25 bp, Homo sapiens
tttctgcagaggaaacgggatggtt

SEQ ID NO: 5125 - DNA, 25 bp, Homo sapiens
gagtcctaggaccatctgggctctg

SEQ ID NO: 5126 - DNA, 25 bp, Homo sapiens
cccgagagaggaagtggtcagctaa

SEQ ID NO: 5127 - DNA, 25 bp, Homo sapiens
taaggccaggacagagagtttaatg

SEQ ID NO: 5128 - DNA, 25 bp, Homo sapiens
tccacggtggtcaggtacatgatgc

SEQ ID NO: 5129 - DNA, 25 bp, Homo sapiens
ccttatttggtgatttgagcctctg

SEQ ID NO: 5130 - DNA, 25 bp, Homo sapiens
ctccactgtcatggtgggctcctgt

SEQ ID NO: 5131 - DNA, 25 bp, Homo sapiens
caagaaagatggatgggaaaactcc

SEQ ID NO: 5132 - DNA, 25 bp, Homo sapiens
ggctcaaaggctatagaaataccac

SEQ ID NO: 5133 - DNA, 25 bp, Homo sapiens
ttgccacgtggcacagccttccaaa

SEQ ID NO: 5134 - DNA, 25 bp, Homo sapiens
tccagaaccctcaagaataatccct

SEQ ID NO: 5135 - DNA, 25 bp, Homo sapiens
aatcctggccccatagcctgaggga

SEQ ID NO: 5136 - DNA, 25 bp, Homo sapiens
tatttatcccgatctttgaacacca

SEQ ID NO: 5137 - DNA, 25 bp, Homo sapiens
ttttgtcaccgtccagaatcactgg

SEQ ID NO: 5138 - DNA, 25 bp, Homo sapiens
taggctgtacctggcgcagaggcct

SEQ ID NO: 5139 - DNA, 25 bp, Homo sapiens
taaaaaccacctactggctaccatg

SEQ ID NO: 5140 - DNA, 25 bp, Homo sapiens
tgcagttaaccagtatttgaggtct

SEQ ID NO: 5141 - DNA, 25 bp, Homo sapiens
tttaacaccaactcagcaagagatc

SEQ ID NO: 5142 - DNA, 25 bp, Homo sapiens
tctcagggatcctagtgtctggtag

SEQ ID NO: 5143 - DNA, 25 bp, Homo sapiens
ctgaatcatcttccaaaagatttct

SEQ ID NO: 5144 - DNA, 25 bp, Homo sapiens
tcgaggtctccaagtgggacaaacc

SEQ ID NO: 5145 - DNA, 25 bp, Homo sapiens
tgtccacttccagaaaagagccgcc

SEQ ID NO: 5146 - DNA, 25 bp, Homo sapiens
gtacatatgctccaccttaaccttg

SEQ ID NO: 5147 - DNA, 25 bp, Homo sapiens
aaccatgactccatttgtcagtctg

SEQ ID NO: 5148 - DNA, 25 bp, Homo sapiens
tatattttgccatcgctcacccgaa

SEQ ID NO: 5149 - DNA, 25 bp, Homo sapiens
aatggcctcttctcgattctgcaac

SEQ ID NO: 5150 - DNA, 25 bp, Homo sapiens
gaggttcttcaaactccgggcataa

SEQ ID NO: 5151 - DNA, 25 bp, Homo sapiens
cagtccataatgttgtagttacgga

SEQ ID NO: 5152 - DNA, 25 bp, Homo sapiens
tattgcgggtgatgatgacaggctc

SEQ ID NO: 5153 - DNA, 25 bp, Homo sapiens
tatgactgattcttgccgttgagac

SEQ ID NO: 5154 - DNA, 25 bp, Homo sapiens
gaccaaaaatgacagggcaaagcga

SEQ ID NO: 5155 - DNA, 25 bp, Homo sapiens
caataataaataagggtgacgggct

SEQ ID NO: 5156 - DNA, 25 bp, Homo sapiens
aacacatgggatctagggactgtca

SEQ ID NO: 5157 - DNA, 25 bp, Homo sapiens
gcatttgcggcagctctaccactga

SEQ ID NO: 5158 - DNA, 25 bp, Homo sapiens
gggtcctcgtcaccgtttgagtcga

SEQ ID NO: 5159 - DNA, 25 bp, Homo sapiens
gaggaggatcccgacttccttccac

SEQ ID NO: 5160 - DNA, 25 bp, Homo sapiens
cagcctcttctcagtcggtcttttc

SEQ ID NO: 5161 - DNA, 25 bp, Homo sapiens
tagtgttgtcagatgagccactcac

SEQ ID NO: 5162 - DNA, 25 bp, Homo sapiens
aaccagcggttactgagttcagcca

SEQ ID NO: 5163 - DNA, 25 bp, Homo sapiens
cacaagttagcaacatacaagcaca

SEQ ID NO: 5164 - DNA, 25 bp, Homo sapiens
taatagcatttacgtagtggcagaa

SEQ ID NO: 5165 - DNA, 25 bp, Homo sapiens
tatggtccaaggttagtgaaagtcc

SEQ ID NO: 5166 - DNA, 25 bp, Homo sapiens
catcctaagtgcatggtggcctcag

SEQ ID NO: 5167 - DNA, 25 bp, Homo sapiens
tagttatgagatagacgcgcaccac

SEQ ID NO: 5168 - DNA, 25 bp, Homo sapiens
tatcctgggtggcacagtccatcca

SEQ ID NO: 5169 - DNA, 25 bp, Homo sapiens
taccttccatttactagctgggtga

SEQ ID NO: 5170 - DNA, 25 bp, Homo sapiens
gatcttaacactgatgtctcgggca

SEQ ID NO: 5171 - DNA, 25 bp, Homo sapiens
gaaaataccttgcatgagaccactg

SEQ ID NO: 5172 - DNA, 25 bp, Homo sapiens
tcttcatcacttagactctccagcg

SEQ ID NO: 5173 - DNA, 25 bp, Homo sapiens
tctgctcacacaattttcccagcag

SEQ ID NO: 5174 - DNA, 25 bp, Homo sapiens
tcccatccggaggccatgctaatgt

SEQ ID NO: 5175 - DNA, 25 bp, Homo sapiens
tcctttcttcatgccttctcattgc

SEQ ID NO: 5176 - DNA, 25 bp, Homo sapiens
ccggatctcaccaagggactcctgg

SEQ ID NO: 5177 - DNA, 25 bp, Homo sapiens
cacataagattgtagcaccagcagc

SEQ ID NO: 5178 - DNA, 25 bp, Homo sapiens
tgatttacatgtgcagcaacaatgg

SEQ ID NO: 5179 - DNA, 25 bp, Homo sapiens
cagtggtccctgcatccggagggag

SEQ ID NO: 5180 - DNA, 25 bp, Homo sapiens
ggaaccccgtggatattatgcagcg

SEQ ID NO: 5181 - DNA, 25 bp, Homo sapiens
tcggcttctcaagcggcaagtggct

SEQ ID NO: 5182 - DNA, 25 bp, Homo sapiens
gccccaaagaagacatctggtgggt

SEQ ID NO: 5183 - DNA, 25 bp, Homo sapiens
tcctgagggttatttgtgccacacc

SEQ ID NO: 5184 - DNA, 25 bp, Homo sapiens
cacttggacagaacagtcaggcagc

SEQ ID NO: 5185 - DNA, 25 bp, Homo sapiens
catgcaggagggaaaagtccagtac

SEQ ID NO: 5186 - DNA, 25 bp, Homo sapiens
tgaatttctccacgatctgcgcagg

SEQ ID NO: 5187 - DNA, 25 bp, Homo sapiens
gatgcacatcaaaagcatagcccca

SEQ ID NO: 5188 - DNA, 25 bp, Homo sapiens
ttcatgggctccgtcaaggagaact

SEQ ID NO: 5189 - DNA, 25 bp, Homo sapiens
ggttgagtaaacattggcaagctgt

SEQ ID NO: 5190 - DNA, 25 bp, Homo sapiens
tccccataccatactaagtaactca

SEQ ID NO: 5191 - DNA, 25 bp, Homo sapiens
gttaggataaatccaacgactagcc

SEQ ID NO: 5192 - DNA, 25 bp, Homo sapiens
gagacacatccatgaatttgcgatg

SEQ ID NO: 5193 - DNA, 25 bp, Homo sapiens
ataaacttcccatctggagcaggcc

SEQ ID NO: 5194 - DNA, 25 bp, Homo sapiens
cattttctggaaacacataatcgta

SEQ ID NO: 5195 - DNA, 25 bp, Homo sapiens
ttcctgaagacctgctcgcacactg

SEQ ID NO: 5196 - DNA, 25 bp, Homo sapiens
gcctttttcgacaccagagagttca

SEQ ID NO: 5197 - DNA, 25 bp, Homo sapiens
tggcaagggaaaccagtactcccca

SEQ ID NO: 5198 - DNA, 25 bp, Homo sapiens
tctccgagaaatgggaagcagaaag

SEQ ID NO: 5199 - DNA, 25 bp, Homo sapiens
tgagttgtttacagcccaccaggag

SEQ ID NO: 5200 - DNA, 25 bp, Homo sapiens
ttccccatgagggagaggcactgga

SEQ ID NO: 5201 - DNA, 25 bp, Homo sapiens
tcacatggtcctgagacaacataca

SEQ ID NO: 5202 - DNA, 25 bp, Homo sapiens
ggtggagcttctcccgggaagccac

SEQ ID NO: 5203 - DNA, 25 bp, Homo sapiens
tggttactggaacccttcgtctgca

SEQ ID NO: 5204 - DNA, 25 bp, Homo sapiens
tattattacaggcatactttggagc

SEQ ID NO: 5205 - DNA, 25 bp, Homo sapiens
catagtctctgctctgtcgtttcac

SEQ ID NO: 5206 - DNA, 25 bp, Homo sapiens
tagatgaggggatgggttaacagaa

SEQ ID NO: 5207 - DNA, 25 bp, Homo sapiens
cattaaagaaacctagaccatcatc

SEQ ID NO: 5208 - DNA, 25 bp, Homo sapiens
taactgtagagggtatcgactgcaa

SEQ ID NO: 5209 - DNA, 25 bp, Homo sapiens
ctttgccgccttcgtggtcaccgga

SEQ ID NO: 5210 - DNA, 25 bp, Homo sapiens
ttcttctggcccacgaaggcctggg

SEQ ID NO: 5211 - DNA, 25 bp, Homo sapiens
ttgatgatagagaataacgtccacc

SEQ ID NO: 5212 - DNA, 25 bp, Homo sapiens
ctgattggcccagacttaggtgggt

SEQ ID NO: 5213 - DNA, 25 bp, Homo sapiens
catcaagaactgtctcccaggcagc

SEQ ID NO: 5214 - DNA, 25 bp, Homo sapiens
gtttctggactcaaagggtgctcct

SEQ ID NO: 5215 - DNA, 25 bp, Homo sapiens
gctggtggagcacttgagacatact

SEQ ID NO: 5216 - DNA, 25 bp, Homo sapiens
gacggagacagtgcagccctgcgca

SEQ ID NO: 5217 - DNA, 25 bp, Homo sapiens
gacatgggcagctatttgtaaaatg

SEQ ID NO: 5218 - DNA, 25 bp, Homo sapiens
tagacaagccctgcctgagaagatg

SEQ ID NO: 5219 - DNA, 25 bp, Homo sapiens
ctctagtgtagtgacgtagggagcc

SEQ ID NO: 5220 - DNA, 25 bp, Homo sapiens
ccagtttcatcagaaatcacgttca

SEQ ID NO: 5221 - DNA, 25 bp, Homo sapiens
atgcacaaggacctccgactgcacg

SEQ ID NO: 5222 - DNA, 25 bp, Homo sapiens
gcagcagcggctctcatagtagtag

SEQ ID NO: 5223 - DNA, 25 bp, Homo sapiens
ccaggaggaaaagagctcggtcaac

SEQ ID NO: 5224 - DNA, 25 bp, Homo sapiens
ggctgattttaacaggaaaggttga

SEQ ID NO: 5225 - DNA, 25 bp, Homo sapiens
gacagttttctttcagtggattgga

SEQ ID NO: 5226 - DNA, 25 bp, Homo sapiens
gggcccaggctccattattgatata

SEQ ID NO: 5227 - DNA, 25 bp, Homo sapiens
gtcatgtctggtagttcatctgcca

SEQ ID NO: 5228 - DNA, 25 bp, Homo sapiens
gaggtcccaccagtagagttcttga

SEQ ID NO: 5229 - DNA, 25 bp, Homo sapiens
gagttgcaaaccatcggacaagggc

SEQ ID NO: 5230 - DNA, 25 bp, Homo sapiens
gaagtgctcatgactcccaatctgc

SEQ ID NO: 5231 - DNA, 25 bp, Homo sapiens
tacaccgcacgacccatttttatgg

SEQ ID NO: 5232 - DNA, 25 bp, Homo sapiens
aggcaacaacactgagactcctcct

SEQ ID NO: 5233 - DNA, 25 bp, Homo sapiens
tagattatacccacaaacagcactg

SEQ ID NO: 5234 - DNA, 25 bp, Homo sapiens
tatgaaaagaagcatcacactgcag

SEQ ID NO: 5235 - DNA, 25 bp, Homo sapiens
tcttttaactgggaagcacatttca

SEQ ID NO: 5236 - DNA, 25 bp, Homo sapiens
tatacagagcacacatctcatgggc

SEQ ID NO: 5237 - DNA, 25 bp, Homo sapiens
gcggccgggcgacgggcgccggagc

SEQ ID NO: 5238 - DNA, 25 bp, Homo sapiens
caagtgggatcagtactgcccttct

SEQ ID NO: 5239 - DNA, 25 bp, Homo sapiens
tttactatcagaagaccagcacagg

SEQ ID NO: 5240 - DNA, 25 bp, Homo sapiens
tacttcctggctgaatattggccat

SEQ ID NO: 5241 - DNA, 25 bp, Homo sapiens
catagctggtgttaggagagtgact

SEQ ID NO: 5242 - DNA, 25 bp, Homo sapiens
tgacatctgagcacgacaaggctag

SEQ ID NO: 5243 - DNA, 25 bp, Homo sapiens
attcagtcccttcacaggacacgtg

SEQ ID NO: 5244 - DNA, 25 bp, Homo sapiens
ctctgcctccaaacggattcgggat

SEQ ID NO: 5245 - DNA, 25 bp, Homo sapiens
caagagaacccagatcagcaaggca

SEQ ID NO: 5246 - DNA, 25 bp, Homo sapiens
cccccgagttcggcgcgacccgagc

SEQ ID NO: 5247 - DNA, 25 bp, Homo sapiens
ctttatctcatttgaactgagggag

SEQ ID NO: 5248 - DNA, 25 bp, Homo sapiens
taaacaggaaactcggcacggggca

SEQ ID NO: 5249 - DNA, 25 bp, Homo sapiens
gaaagtacctacaaggctcacagga

SEQ ID NO: 5250 - DNA, 25 bp, Homo sapiens
cctctctgagggtccgagggcccgc

SEQ ID NO: 5251 - DNA, 25 bp, Homo sapiens
tgcattgagcaccttctgggacggg

SEQ ID NO: 5252 - DNA, 25 bp, Homo sapiens
gaagaaaagtggtaagtcctcagct

SEQ ID NO: 5253 - DNA, 25 bp, Homo sapiens
taataagtgattacgtggcctccca

SEQ ID NO: 5254 - DNA, 25 bp, Homo sapiens
tctggaggaaatccaccagcaggtg

SEQ ID NO: 5255 - DNA, 25 bp, Homo sapiens
tccgagatgggctccaccttgatct

SEQ ID NO: 5256 - DNA, 25 bp, Homo sapiens
agtcaccacccagaaattgtccgag

SEQ ID NO: 5257 - DNA, 25 bp, Homo sapiens
gagagaggaggtggggggagaagcg

SEQ ID NO: 5258 - DNA, 25 bp, Homo sapiens
tttcaaaactcaagggactgccagc

SEQ ID NO: 5259 - DNA, 25 bp, Homo sapiens
gatgaagttaaataagcaaaggtac

SEQ ID NO: 5260 - DNA, 25 bp, Homo sapiens
ggcctaattacaggcactaactgtg

SEQ ID NO: 5261 - DNA, 25 bp, Homo sapiens
agtacatgtgctaaagaagtgggca

SEQ ID NO: 5262 - DNA, 25 bp, Homo sapiens
gcaaattcagtaacgcaggcaccaa

SEQ ID NO: 5263 - DNA, 25 bp, Homo sapiens
tttaagaccccaagacaaatcacca

SEQ ID NO: 5264 - DNA, 25 bp, Homo sapiens
tcaaattctcctgacttcacgcctg

SEQ ID NO: 5265 - DNA, 25 bp, Homo sapiens
ggctttggcgactgcgctactcccg

SEQ ID NO: 5266 - DNA, 25 bp, Homo sapiens
caggctcctcatggtgatcttccca

SEQ ID NO: 5267 - DNA, 25 bp, Homo sapiens
tgagtgcgccaaagttcaacaagcc

SEQ ID NO: 5268 - DNA, 25 bp, Homo sapiens
cagagtgagtcttgtagtgggaaaa

SEQ ID NO: 5269 - DNA, 25 bp, Homo sapiens
caataaacagaatcatcatagcagt

SEQ ID NO: 5270 - DNA, 25 bp, Homo sapiens
tcgtacttggtcctccactgggcaa

SEQ ID NO: 5271 - DNA, 25 bp, Homo sapiens
catgtcaaggcaacgcttattggcc

SEQ ID NO: 5272 - DNA, 25 bp, Homo sapiens
catactgaagtagggaacaagacca

SEQ ID NO: 5273 - DNA, 25 bp, Homo sapiens
gaaaacatctcaggcgtcatcaact

SEQ ID NO: 5274 - DNA, 25 bp, Homo sapiens
gcttacgtcaggcaacaaactcaaa

SEQ ID NO: 5275 - DNA, 25 bp, Homo sapiens
ttttaagtccaaggtaccatctgcc

SEQ ID NO: 5276 - DNA, 25 bp, Homo sapiens
catgggtggtacaaacaggtagaca

SEQ ID NO: 5277 - DNA, 25 bp, Homo sapiens
ggctcggacgcaccttccgcgaagg

SEQ ID NO: 5278 - DNA, 25 bp, Homo sapiens
ggtttcaccatatcccactgtctgt

SEQ ID NO: 5279 - DNA, 25 bp, Homo sapiens
taagaagaacctgagaacacatgag

SEQ ID NO: 5280 - DNA, 25 bp, Homo sapiens
cagatgtttctttagctgagacaca

SEQ ID NO: 5281 - DNA, 25 bp, Homo sapiens
tgttgaacaaccgtcagcctggctc

SEQ ID NO: 5282 - DNA, 25 bp, Homo sapiens
aaactaacccacatactgcccttgg

SEQ ID NO: 5283 - DNA, 25 bp, Homo sapiens
tgcactgccttgaattccatctgta

SEQ ID NO: 5284 - DNA, 25 bp, Homo sapiens
gctcgcgcccgcctttgttagtttc

SEQ ID NO: 5285 - DNA, 25 bp, Homo sapiens
ccaaggtgcgaaaagaactagctgc

SEQ ID NO: 5286 - DNA, 25 bp, Homo sapiens
gtgccaacattgagggaggcgcatc

SEQ ID NO: 5287 - DNA, 25 bp, Homo sapiens
tctacgaaattgtcttctgggcctg

SEQ ID NO: 5288 - DNA, 25 bp, Homo sapiens
catagcggtcacacatctgcatcac

SEQ ID NO: 5289 - DNA, 25 bp, Homo sapiens
gatctgccggtcatactgtgccgcc

SEQ ID NO: 5290 - DNA, 25 bp, Homo sapiens
tgtcttcatttcgaaacacagccca

SEQ ID NO: 5291 - DNA, 25 bp, Homo sapiens
tacaacttccccaaatcgagacaag

SEQ ID NO: 5292 - DNA, 25 bp, Homo sapiens
agagggcagccaggaagtacatgat

SEQ ID NO: 5293 - DNA, 25 bp, Homo sapiens
tgccagtgtctccttaatacttctt

SEQ ID NO: 5294 - DNA, 25 bp, Homo sapiens
gaatcatgaagacaaaggaccagcg

SEQ ID NO: 5295 - DNA, 25 bp, Homo sapiens
cagctcaaccccatgaactcagtgt

SEQ ID NO: 5296 - DNA, 25 bp, Homo sapiens
ttgccgccttcgtggtcaccggaac

SEQ ID NO: 5297 - DNA, 25 bp, Homo sapiens
gtaattagttataacgaaattcata

SEQ ID NO: 5298 - DNA, 25 bp, Homo sapiens
tacatgaaaacacggcaactccagg

SEQ ID NO: 5299 - DNA, 25 bp, Homo sapiens
gcgtgaactcgttgctgaagccaaa

SEQ ID NO: 5300 - DNA, 25 bp, Homo sapiens
cattgtgcgttaacagtggctcaga

SEQ ID NO: 5301 - DNA, 25 bp, Homo sapiens
ccttgcagaagacgccgtacgaggt

SEQ ID NO: 5302 - DNA, 25 bp, Homo sapiens
taacatattaagaacttggaggagg

SEQ ID NO: 5303 - DNA, 25 bp, Homo sapiens
caataagctcatgttcccatccagt

SEQ ID NO: 5304 - DNA, 25 bp, Homo sapiens
caagatgttctggaaaggagccgcg

SEQ ID NO: 5305 - DNA, 25 bp, Homo sapiens
tggttccattgtggaaacactggca

SEQ ID NO: 5306 - DNA, 25 bp, Homo sapiens
acagtggtgactcatcagagggcga

SEQ ID NO: 5307 - DNA, 25 bp, Homo sapiens
gaaatctgtaactggccgtgataaa

SEQ ID NO: 5308 - DNA, 25 bp, Homo sapiens
aactaagggtgagaccaagacctat

SEQ ID NO: 5309 - DNA, 25 bp, Homo sapiens
tttacaggatggaagcaagtcagcc

SEQ ID NO: 5310 - DNA, 25 bp, Homo sapiens
tgaaccgcccagtctttgacctgag

SEQ ID NO: 5311 - DNA, 25 bp, Homo sapiens
tagaccgattctttagcttcctgca

SEQ ID NO: 5312 - DNA, 25 bp, Homo sapiens
ggcgacacatctgtcctactagaga

SEQ ID NO: 5313 - DNA, 25 bp, Homo sapiens
cttatactggctgaaaaaactttgc

SEQ ID NO: 5314 - DNA, 25 bp, Homo sapiens
tgtggctatcaacagtagatctggt

SEQ ID NO: 5315 - DNA, 25 bp, Homo sapiens
ttatacaaagtcaaagcctcccagc

SEQ ID NO: 5316 - DNA, 25 bp, Homo sapiens
tgaattgattctcacagggcctgct

SEQ ID NO: 5317 - DNA, 25 bp, Homo sapiens
gaagtatccgttacagctggcgacg

SEQ ID NO: 5318 - DNA, 25 bp, Homo sapiens
gaggttaaagccgacagcagcagtt

SEQ ID NO: 5319 - DNA, 25 bp, Homo sapiens
catgtagccgactgttccaactctt

SEQ ID NO: 5320 - DNA, 25 bp, Homo sapiens
tcaatatgcttaacactgggccacg

SEQ ID NO: 5321 - DNA, 25 bp, Homo sapiens
tctgctgcagggaataagaactttc

SEQ ID NO: 5322 - DNA, 25 bp, Homo sapiens
catttaggttcttcactgggactgt

SEQ ID NO: 5323 - DNA, 25 bp, Homo sapiens
gacttcatggatccaataagcacga

SEQ ID NO: 5324 - DNA, 25 bp, Homo sapiens
ctgagatcatgactccaaattaaga

SEQ ID NO: 5325 - DNA, 25 bp, Homo sapiens
gaagaggccaaaaatcatcagctga

SEQ ID NO: 5326 - DNA, 25 bp, Homo sapiens
cggaggcgcccaccatgaagtaggt

SEQ ID NO: 5327 - DNA, 25 bp, Homo sapiens
cattgaacttgtccaaattggtggg

SEQ ID NO: 5328 - DNA, 25 bp, Homo sapiens
tcttcgactgcatcttttcctagtt

SEQ ID NO: 5329 - DNA, 25 bp, Homo sapiens
gagacgtagtccaggctgaggtaca

SEQ ID NO: 5330 - DNA, 25 bp, Homo sapiens
gatccagccggaagtgacaaaaaga

SEQ ID NO: 5331 - DNA, 25 bp, Homo sapiens
caaatgagcgttaaacacccaatca

SEQ ID NO: 5332 - DNA, 25 bp, Homo sapiens
catataatcctggaaacgactccaa

SEQ ID NO: 5333 - DNA, 25 bp, Homo sapiens
tgttttttccacatcatactgtcca

SEQ ID NO: 5334 - DNA, 25 bp, Homo sapiens
catcaagttagggtgagtcatcccg

SEQ ID NO: 5335 - DNA, 25 bp, Homo sapiens
tagacaccgtagcacatgctcaaac

SEQ ID NO: 5336 - DNA, 25 bp, Homo sapiens
gagagctttgtttttacttcagaca

SEQ ID NO: 5337 - DNA, 25 bp, Homo sapiens
taactccagtcttgtacttgtcaca

SEQ ID NO: 5338 - DNA, 25 bp, Homo sapiens
aactgccaggttgggaaattcctcg

SEQ ID NO: 5339 - DNA, 25 bp, Homo sapiens
tctggtggatatggagcagaactcc

SEQ ID NO: 5340 - DNA, 25 bp, Homo sapiens
cgttagcagacagcaaaacatgaaa

SEQ ID NO: 5341 - DNA, 25 bp, Homo sapiens
ggcttttgtaccaggtcattcttta

SEQ ID NO: 5342 - DNA, 25 bp, Homo sapiens
cctaggtactcttcttgtttgtcaa

SEQ ID NO: 5343 - DNA, 25 bp, Homo sapiens
aaaggcatcttcaaccaacaggcaa

SEQ ID NO: 5344 - DNA, 25 bp, Homo sapiens
tcccgaaatgtgtctggtcccaaag

SEQ ID NO: 5345 - DNA, 25 bp, Homo sapiens
tcagaaagcacttaagacagccact

SEQ ID NO: 5346 - DNA, 25 bp, Homo sapiens
ttattgtgggtcagcttggcggcca

SEQ ID NO: 5347 - DNA, 25 bp, Homo sapiens
tgaagattagacaccttccctggct

SEQ ID NO: 5348 - DNA, 25 bp, Homo sapiens
tggcaatgcccgtgatggtgccgcc

SEQ ID NO: 5349 - DNA, 25 bp, Homo sapiens
tatcgaatctgtgaagccgctgtct

SEQ ID NO: 5350 - DNA, 25 bp, Homo sapiens
ttcttgaagttgtcttacaatcacc

SEQ ID NO: 5351 - DNA, 25 bp, Homo sapiens
tgttaataaaccagggcgggtgaca

SEQ ID NO: 5352 - DNA, 25 bp, Homo sapiens
tctgtctagtaccacaggtcatgag

SEQ ID NO: 5353 - DNA, 25 bp, Homo sapiens
tgaggagcatttcacaggtcacgcc

SEQ ID NO: 5354 - DNA, 25 bp, Homo sapiens
tgtaccgctacctgggcgaagcgct

SEQ ID NO: 5355 - DNA, 25 bp, Homo sapiens
ttcagaggctccaacatttcagaca

SEQ ID NO: 5356 - DNA, 25 bp, Homo sapiens
tttttgaaactgctggatgagttca

SEQ ID NO: 5357 - DNA, 25 bp, Homo sapiens
tctcctcagaaaaacgtagttgtcc

SEQ ID NO: 5358 - DNA, 25 bp, Homo sapiens
tagctcagctcaacatggattcacc

SEQ ID NO: 5359 - DNA, 25 bp, Homo sapiens
taacctattattgtgcagcaggcct

SEQ ID NO: 5360 - DNA, 25 bp, Homo sapiens
tcaggtatcctgacccacggtcttg

SEQ ID NO: 5361 - DNA, 25 bp, Homo sapiens
tgtatcaaactctgcctcggaaagg

SEQ ID NO: 5362 - DNA, 25 bp, Homo sapiens
gagaacacactattccagaacagag

SEQ ID NO: 5363 - DNA, 25 bp, Homo sapiens
gattctgcagagtactgaggtggca

SEQ ID NO: 5364 - DNA, 25 bp, Homo sapiens
tcaacttaagtacaaaacacgacga

SEQ ID NO: 5365 - DNA, 25 bp, Homo sapiens
caggtggtgagtgtagtgcccaaca

SEQ ID NO: 5366 - DNA, 25 bp, Homo sapiens
tcaccccaaaaagagggcctgagtg

SEQ ID NO: 5367 - DNA, 25 bp, Homo sapiens
tcaacaggttcaatgtcaagggtgt

SEQ ID NO: 5368 - DNA, 25 bp, Homo sapiens
gaaactcctcataaatctcagcagc

SEQ ID NO: 5369 - DNA, 25 bp, Homo sapiens
aaatttctgttcctgctcgatgcgg

SEQ ID NO: 5370 - DNA, 25 bp, Homo sapiens
gtgcgagttcgaggccaacacctgg

SEQ ID NO: 5371 - DNA, 25 bp, Homo sapiens
ttcaagggcagcagacgtgatggtt

SEQ ID NO: 5372 - DNA, 25 bp, Homo sapiens
actccagttcctagggcgggtgcag

SEQ ID NO: 5373 - DNA, 25 bp, Homo sapiens
tttttctgttgatgggataagacct

SEQ ID NO: 5374 - DNA, 25 bp, Homo sapiens
taatatcacagtaacacaaacaggc

SEQ ID NO: 5375 - DNA, 25 bp, Homo sapiens
catgggcatccagccatgaatgtgg

SEQ ID NO: 5376 - DNA, 25 bp, Homo sapiens
ggctgcaccagcctgcctgctgagt

SEQ ID NO: 5377 - DNA, 25 bp, Homo sapiens
cagtagtgaactatgatggtaccag

SEQ ID NO: 5378 - DNA, 25 bp, Homo sapiens
caaggccattctatcacttgcctct

SEQ ID NO: 5379 - DNA, 25 bp, Homo sapiens
attaaccacatttcatgcatctcca

SEQ ID NO: 5380 - DNA, 25 bp, Homo sapiens
tagaccagtgacctttgctgtgccc

SEQ ID NO: 5381 - DNA, 25 bp, Homo sapiens
taaacaggttcgttcttggcgccac

SEQ ID NO: 5382 - DNA, 25 bp, Homo sapiens
taccttgattcataaggaagcccca

SEQ ID NO: 5383 - DNA, 25 bp, Homo sapiens
ctaggagggctcattccagacacag

SEQ ID NO: 5384 - DNA, 25 bp, Homo sapiens
gatcattgcagacagggcctccata

SEQ ID NO: 5385 - DNA, 25 bp, Homo sapiens
gcttgtcctgtgaccacgggagaga

SEQ ID NO: 5386 - DNA, 25 bp, Homo sapiens
gatagaagctgccaaggtctgggct

SEQ ID NO: 5387 - DNA, 25 bp, Homo sapiens
ggaatgcagctgctcatctgttggg

SEQ ID NO: 5388 - DNA, 25 bp, Homo sapiens
gaagtgtggtcctcgactccaaggc

SEQ ID NO: 5389 - DNA, 25 bp, Homo sapiens
tgcgtaaagccaaacgacggcagca

SEQ ID NO: 5390 - DNA, 25 bp, Homo sapiens
gaagtttgtcataggaagggcagcc

SEQ ID NO: 5391 - DNA, 25 bp, Homo sapiens
agggctggaccatcaaggctttagt

SEQ ID NO: 5392 - DNA, 25 bp, Homo sapiens
aaagcactctcacccaggtagcaag

SEQ ID NO: 5393 - DNA, 25 bp, Homo sapiens
aggtccccaaatcctgaaaatgcac

SEQ ID NO: 5394 - DNA, 25 bp, Homo sapiens
cggagcagcagtgattccagcttca

SEQ ID NO: 5395 - DNA, 25 bp, Homo sapiens
cgcaatcgacgaggtgaatcactgt

SEQ ID NO: 5396 - DNA, 25 bp, Homo sapiens
ttaaatgcaaatagaccactcacaa

SEQ ID NO: 5397 - DNA, 25 bp, Homo sapiens
ctgcaggtaaaacgccgcgcctggg

SEQ ID NO: 5398 - DNA, 25 bp, Homo sapiens
tcaaaggcaggaaaggctgaggcct

SEQ ID NO: 5399 - DNA, 25 bp, Homo sapiens
gggcactttatctgcctgatcagat

SEQ ID NO: 5400 - DNA, 25 bp, Homo sapiens
tatgcctaaaattatcaaagtcccc

SEQ ID NO: 5401 - DNA, 25 bp, Homo sapiens
gcttaatggaatggaacactgctcc

SEQ ID NO: 5402 - DNA, 25 bp, Homo sapiens
taaaatgcaaaacccaggttgggca

SEQ ID NO: 5403 - DNA, 25 bp, Homo sapiens
tctagtcgaagaagccacttggtcc

SEQ ID NO: 5404 - DNA, 25 bp, Homo sapiens
cattcttttgctcatgcggatggga

SEQ ID NO: 5405 - DNA, 25 bp, Homo sapiens
agggagatcatttcactactggatg

SEQ ID NO: 5406 - DNA, 25 bp, Homo sapiens
aggccataggtcatagctgagaagt

SEQ ID NO: 5407 - DNA, 25 bp, Homo sapiens
ttgtcctgacaagctggtgggagct

SEQ ID NO: 5408 - DNA, 25 bp, Homo sapiens
caaagtcagcatcattatggtccga

SEQ ID NO: 5409 - DNA, 25 bp, Homo sapiens
aagtgtggtcctcgactccaaggca

SEQ ID NO: 5410 - DNA, 25 bp, Homo sapiens
taattcaaagaactcggcacagcac

SEQ ID NO: 5411 - DNA, 25 bp, Homo sapiens
cattgaggtctactatgtactagtc

SEQ ID NO: 5412 - DNA, 25 bp, Homo sapiens
gccagacccgatggagcgagcaccg

SEQ ID NO: 5413 - DNA, 25 bp, Homo sapiens
tcaaaatagacacagggaaggccat

SEQ ID NO: 5414 - DNA, 25 bp, Homo sapiens
cacacttttgagtagtgagggcctg

SEQ ID NO: 5415 - DNA, 25 bp, Homo sapiens
tttcaccagcttcgcacagactttc

SEQ ID NO: 5416 - DNA, 25 bp, Homo sapiens
cagtttcttgttcccatccgtatgg

SEQ ID NO: 5417 - DNA, 25 bp, Homo sapiens
accacaacatctagcagagaatcac

SEQ ID NO: 5418 - DNA, 25 bp, Homo sapiens
tcagccggcctgtgtacacgaagtc

SEQ ID NO: 5419 - DNA, 25 bp, Homo sapiens
tcaagactacaggtcccagcaagca

SEQ ID NO: 5420 - DNA, 25 bp, Homo sapiens
ctgttgtaatcagttgtaaacacca

SEQ ID NO: 5421 - DNA, 25 bp, Homo sapiens
taagggacagttttctttcagtgga

SEQ ID NO: 5422 - DNA, 25 bp, Homo sapiens
tcagctctgaaagtccggttccaaa

SEQ ID NO: 5423 - DNA, 25 bp, Homo sapiens
caaagtagtttgaagtgtggcctgc

SEQ ID NO: 5424 - DNA, 25 bp, Homo sapiens
tggccacagttctttaccacagatt

SEQ ID NO: 5425 - DNA, 25 bp, Homo sapiens
gagtagtaaataagcctcagcccct

SEQ ID NO: 5426 - DNA, 25 bp, Homo sapiens
gtgacgcctacaaccagataataaa

SEQ ID NO: 5427 - DNA, 25 bp, Homo sapiens
tgtgcaaatctgtaccaccaaggtg

SEQ ID NO: 5428 - DNA, 25 bp, Homo sapiens
ggtcagaatccccatcatcacaaaa

SEQ ID NO: 5429 - DNA, 25 bp, Homo sapiens
caaaggtgcgcttgtaacgctccac

SEQ ID NO: 5430 - DNA, 25 bp, Homo sapiens
ctaaagcaatgggaacagtagaagt

SEQ ID NO: 5431 - DNA, 25 bp, Homo sapiens
tcagaatcccttgagctggctaagt

SEQ ID NO: 5432 - DNA, 25 bp, Homo sapiens
tctcctagacagtgacacagaaagt

SEQ ID NO: 5433 - DNA, 25 bp, Homo sapiens
gtagttcagccagccagtcacattg

SEQ ID NO: 5434 - DNA, 25 bp, Homo sapiens
tcctcctgagttggcctctaaaacc

SEQ ID NO: 5435 - DNA, 25 bp, Homo sapiens
caaagggatgaagggtccgctctca

SEQ ID NO: 5436 - DNA, 25 bp, Homo sapiens
tgaggggaaaactactggagctcct

SEQ ID NO: 5437 - DNA, 25 bp, Homo sapiens
agaaaataattacagcgggcgcggg

SEQ ID NO: 5438 - DNA, 25 bp, Homo sapiens
ctggttttctcccatctaaatacta

SEQ ID NO: 5439 - DNA, 25 bp, Homo sapiens
aatagcaacgctgccttccggaaga

SEQ ID NO: 5440 - DNA, 25 bp, Homo sapiens
tgattggctcactccgcagaccgtg

SEQ ID NO: 5441 - DNA, 25 bp, Homo sapiens
tcaagttcgctgaagacagtgccac

SEQ ID NO: 5442 - DNA, 25 bp, Homo sapiens
tcttgcagtacaaaccaggcagacc

SEQ ID NO: 5443 - DNA, 25 bp, Homo sapiens
taacaatgtcatgcaccagggtgat

SEQ ID NO: 5444 - DNA, 25 bp, Homo sapiens
tatttcttccacagccctcgactaa

SEQ ID NO: 5445 - DNA, 25 bp, Homo sapiens
ggttcatcagctgcacttcccgtag

SEQ ID NO: 5446 - DNA, 25 bp, Homo sapiens
tcatagagctcatggacaccctgga

SEQ ID NO: 5447 - DNA, 25 bp, Homo sapiens
ccaaaacgtttcacacaaatcaggt

SEQ ID NO: 5448 - DNA, 25 bp, Homo sapiens
cggcagcgccttgggacaaaaaaca

SEQ ID NO: 5449 - DNA, 25 bp, Homo sapiens
taggactcctctgttgttaggccat

SEQ ID NO: 5450 - DNA, 25 bp, Homo sapiens
ggcacctgccagaaatacttcgaag

SEQ ID NO: 5451 - DNA, 25 bp, Homo sapiens
gaaaccgaattaggaagaggccatg

SEQ ID NO: 5452 - DNA, 25 bp, Homo sapiens
tgtatgagggatccaagagacatca

SEQ ID NO: 5453 - DNA, 25 bp, Homo sapiens
gctggcatcattttatggtgggcct

SEQ ID NO: 5454 - DNA, 25 bp, Homo sapiens
caatcaccaatggtaagtggcagct

SEQ ID NO: 5455 - DNA, 25 bp, Homo sapiens
tctacttggaagtcagggttctcaa

SEQ ID NO: 5456 - DNA, 25 bp, Homo sapiens
aatcaagattttgtacactcatcat

SEQ ID NO: 5457 - DNA, 25 bp, Homo sapiens
ccggctgggaccacgtcttcaggga

SEQ ID NO: 5458 - DNA, 25 bp, Homo sapiens
tcgacgtccagcacaatggcttcag

SEQ ID NO: 5459 - DNA, 25 bp, Homo sapiens
aggatgctctccgtgctgagtccgc

SEQ ID NO: 5460 - DNA, 25 bp, Homo sapiens
agactttggtcgctttacagtgtca

SEQ ID NO: 5461 - DNA, 25 bp, Homo sapiens
tatcgccaagaacaacaaggtccca

SEQ ID NO: 5462 - DNA, 25 bp, Homo sapiens
gattgaataatcaaacacatatccc

SEQ ID NO: 5463 - DNA, 25 bp, Homo sapiens
tctgtctccattgctaccatcctag

SEQ ID NO: 5464 - DNA, 25 bp, Homo sapiens
tttccaaatctagctccaacaacct

SEQ ID NO: 5465 - DNA, 25 bp, Homo sapiens
ctctgggctatagcacacagggcca

SEQ ID NO: 5466 - DNA, 25 bp, Homo sapiens
ttaagactaattataaagttacagc

SEQ ID NO: 5467 - DNA, 25 bp, Homo sapiens
tcatgaactccattcaaacatatgc

SEQ ID NO: 5468 - DNA, 25 bp, Homo sapiens
ggagctgaggtctgtcaaaacacga

SEQ ID NO: 5469 - DNA, 25 bp, Homo sapiens
gcttaacgcttatggagaggcagat

SEQ ID NO: 5470 - DNA, 25 bp, Homo sapiens
cgctagccgccgcaacaaagtttga

SEQ ID NO: 5471 - DNA, 25 bp, Homo sapiens
tgggagagaatttcgaggctttgca

SEQ ID NO: 5472 - DNA, 25 bp, Homo sapiens
tgcaccaggtggatgtcgtactgtg

SEQ ID NO: 5473 - DNA, 25 bp, Homo sapiens
gcttagaagttccattaagccataa

SEQ ID NO: 5474 - DNA, 25 bp, Homo sapiens
agctctgctccttgaggatgggccg

SEQ ID NO: 5475 - DNA, 25 bp, Homo sapiens
gaaggtgtgctctggtttactacca

SEQ ID NO: 5476 - DNA, 25 bp, Homo sapiens
ggaagctccagagctccgcgtccga

SEQ ID NO: 5477 - DNA, 25 bp, Homo sapiens
tttaattctcatcattcctcagtcc

SEQ ID NO: 5478 - DNA, 25 bp, Homo sapiens
caacaaacctatgctgggagcctga

SEQ ID NO: 5479 - DNA, 25 bp, Homo sapiens
gaacaaatgtctctcctcaaatggg

SEQ ID NO: 5480 - DNA, 25 bp, Homo sapiens
gtcactatcaatcaggcacctgctg

SEQ ID NO: 5481 - DNA, 25 bp, Homo sapiens
ggttttccgctgtgaggatctgccc

SEQ ID NO: 5482 - DNA, 25 bp, Homo sapiens
ttattagccatgtcccatctctggt

SEQ ID NO: 5483 - DNA, 25 bp, Homo sapiens
tcaaggccaccatgctgtttctcag

SEQ ID NO: 5484 - DNA, 25 bp, Homo sapiens
ggaggttgagccagcattgtgtcac

SEQ ID NO: 5485 - DNA, 25 bp, Homo sapiens
cagacggagcgctttccgggagaca

SEQ ID NO: 5486 - DNA, 25 bp, Homo sapiens
tccttatcactgctacaagggtagg

SEQ ID NO: 5487 - DNA, 25 bp, Homo sapiens
gtggtctttgcgcagggcccatgct

SEQ ID NO: 5488 - DNA, 25 bp, Homo sapiens
gcaccaaactaataggatgcaaact

SEQ ID NO: 5489 - DNA, 25 bp, Homo sapiens
gaaagaatctgatgagcttcactag

SEQ ID NO: 5490 - DNA, 25 bp, Homo sapiens
gacgagcacttatatcagacaacag

SEQ ID NO: 5491 - DNA, 25 bp, Homo sapiens
caagatcaatgatggtagccctgga

SEQ ID NO: 5492 - DNA, 25 bp, Homo sapiens
taagaaatccagtcagtaaacagcc

SEQ ID NO: 5493 - DNA, 25 bp, Homo sapiens
taaattccactgctgacctctggga

SEQ ID NO: 5494 - DNA, 25 bp, Homo sapiens
tgcaatcatgatagatgatgaagag

SEQ ID NO: 5495 - DNA, 25 bp, Homo sapiens
tcccacgttggtgcaggtcatacag

SEQ ID NO: 5496 - DNA, 25 bp, Homo sapiens
gaaactgctacttctgcgttacgcg

SEQ ID NO: 5497 - DNA, 25 bp, Homo sapiens
ccataaactggtgcgtcctcgggtt

SEQ ID NO: 5498 - DNA, 25 bp, Homo sapiens
ctaacccagttcaggatcaagaagg

SEQ ID NO: 5499 - DNA, 25 bp, Homo sapiens
ccttagataagtgacagcacactcc

SEQ ID NO: 5500 - DNA, 25 bp, Homo sapiens
caacagagtttccaaattcccattc

SEQ ID NO: 5501 - DNA, 25 bp, Homo sapiens
caatgaaaggtgatctctgcggctc

SEQ ID NO: 5502 - DNA, 25 bp, Homo sapiens
tgagtacagtgtatcactcttggtc

SEQ ID NO: 5503 - DNA, 25 bp, Homo sapiens
tcctggactttagtggcaaactcag

SEQ ID NO: 5504 - DNA, 25 bp, Homo sapiens
ctcgtatcactgtgagactacaagc

SEQ ID NO: 5505 - DNA, 25 bp, Homo sapiens
tctttcagcccaatccactaaggag

SEQ ID NO: 5506 - DNA, 25 bp, Homo sapiens
tcagaacatccccacataatcaatg

SEQ ID NO: 5507 - DNA, 25 bp, Homo sapiens
ttacttttccactcatcagccggcg

SEQ ID NO: 5508 - DNA, 25 bp, Homo sapiens
tcatttcaatgctgagtccactggc

SEQ ID NO: 5509 - DNA, 25 bp, Homo sapiens
gattaaggggggcacggcagatgta

SEQ ID NO: 5510 - DNA, 25 bp, Homo sapiens
gagcccgctggctgtgctaacaatg

SEQ ID NO: 5511 - DNA, 25 bp, Homo sapiens
gctaaggagatcacagcaagattaa

SEQ ID NO: 5512 - DNA, 25 bp, Homo sapiens
tacactcgatcaaaaagtgccggac

SEQ ID NO: 5513 - DNA, 25 bp, Homo sapiens
gggcctttctgacactcccttgcag

SEQ ID NO: 5514 - DNA, 25 bp, Homo sapiens
caaagccatcattcccatagccgta

SEQ ID NO: 5515 - DNA, 25 bp, Homo sapiens
gaacgggcaggagagccctgtcccc

SEQ ID NO: 5516 - DNA, 25 bp, Homo sapiens
tagtataaaacacaggagccacttg

SEQ ID NO: 5517 - DNA, 25 bp, Homo sapiens
caccagactgtgagatcaatgccaa

SEQ ID NO: 5518 - DNA, 25 bp, Homo sapiens
ccaagactacagctttctccagatg

SEQ ID NO: 5519 - DNA, 25 bp, Homo sapiens
tctgccggcgcctgttgaagagctg

SEQ ID NO: 5520 - DNA, 25 bp, Homo sapiens
taagagggagatactaaaagagact

SEQ ID NO: 5521 - DNA, 25 bp, Homo sapiens
gaatggactgaaaaggacaacaccc

SEQ ID NO: 5522 - DNA, 25 bp, Homo sapiens
ggcaactagctcctgaagcataacg

SEQ ID NO: 5523 - DNA, 25 bp, Homo sapiens
caatacaaaacctgctgcataggtc

SEQ ID NO: 5524 - DNA, 25 bp, Homo sapiens
gatgtacaaaacactcctcggaagc

SEQ ID NO: 5525 - DNA, 25 bp, Homo sapiens
ttcatccctgggcaaggagaggtcg

SEQ ID NO: 5526 - DNA, 25 bp, Homo sapiens
tgtctcaggtacagaagtttaatgc

SEQ ID NO: 5527 - DNA, 25 bp, Homo sapiens
acatcctcggtatcgtccaccaggg

SEQ ID NO: 5528 - DNA, 25 bp, Homo sapiens
caccaacctaataaataggccaaat

SEQ ID NO: 5529 - DNA, 25 bp, Homo sapiens
gataagcctcatcctcggaaaacca

SEQ ID NO: 5530 - DNA, 25 bp, Homo sapiens
catcaactattcttgtggcagccag

SEQ ID NO: 5531 - DNA, 25 bp, Homo sapiens
tgaccacatgctgggatctgggctg

SEQ ID NO: 5532 - DNA, 25 bp, Homo sapiens
agaaatatgtcaattcgaaattttt

SEQ ID NO: 5533 - DNA, 25 bp, Homo sapiens
ctgagaagtgtggtcctcgactcca

SEQ ID NO: 5534 - DNA, 25 bp, Homo sapiens
aaggtcacaagcagctggccgagat

SEQ ID NO: 5535 - DNA, 25 bp, Homo sapiens
cttgggtcgcctggtctgtgaagcc

SEQ ID NO: 5536 - DNA, 25 bp, Homo sapiens
taaattaatggtgctctgctgggac

SEQ ID NO: 5537 - DNA, 25 bp, Homo sapiens
gggtacccacatacatacaaggcat

SEQ ID NO: 5538 - DNA, 25 bp, Homo sapiens
tcgcacccgtaacgcgtcggggcct

SEQ ID NO: 5539 - DNA, 25 bp, Homo sapiens
cacactgtgagagaagacctggtgg

SEQ ID NO: 5540 - DNA, 25 bp, Homo sapiens
tcagcttttaggctagaaatagaag

SEQ ID NO: 5541 - DNA, 25 bp, Homo sapiens
gaaaatgtgcattccgagctaaggg

SEQ ID NO: 5542 - DNA, 25 bp, Homo sapiens
cctttaagaagtgattgatccattc

SEQ ID NO: 5543 - DNA, 25 bp, Homo sapiens
agctcactgtgcagtcccagcagca

SEQ ID NO: 5544 - DNA, 25 bp, Homo sapiens
tttcgcctgaatgaaaaaggactca

SEQ ID NO: 5545 - DNA, 25 bp, Homo sapiens
cttatagagtcccaggcaccattcc

SEQ ID NO: 5546 - DNA, 25 bp, Homo sapiens
ccaccatctagtttggattgttcaa

SEQ ID NO: 5547 - DNA, 25 bp, Homo sapiens
gattggatggcagaatctggatcta

SEQ ID NO: 5548 - DNA, 25 bp, Homo sapiens
tgcggtacagcatgaaacccaccag

SEQ ID NO: 5549 - DNA, 25 bp, Homo sapiens
ccagcccaggttgtcagcgatgata

SEQ ID NO: 5550 - DNA, 25 bp, Homo sapiens
caaaaagagtggtgatgaacagagg

SEQ ID NO: 5551 - DNA, 25 bp, Homo sapiens
caggattaggaaaaccgccacagct

SEQ ID NO: 5552 - DNA, 25 bp, Homo sapiens
tggctggttgccagcccacctaggt

SEQ ID NO: 5553 - DNA, 25 bp, Homo sapiens
tcctcaaacagatgaaatcgggcat

SEQ ID NO: 5554 - DNA, 25 bp, Homo sapiens
tgctgagtagccagtagcctgacgc

SEQ ID NO: 5555 - DNA, 25 bp, Homo sapiens
aaccatgggatgtcttaggaagagg

SEQ ID NO: 5556 - DNA, 25 bp, Homo sapiens
agaggcacatctctcccagtctggg

SEQ ID NO: 5557 - DNA, 25 bp, Homo sapiens
ccatgggctggaggtcaaaggtcac

SEQ ID NO: 5558 - DNA, 25 bp, Homo sapiens
tacatcccagtacaaatgcatcctt

SEQ ID NO: 5559 - DNA, 25 bp, Homo sapiens
agacatcttcttccaaggaaccttg

SEQ ID NO: 5560 - DNA, 25 bp, Homo sapiens
ggcaataactgcaatatccttgtct

SEQ ID NO: 5561 - DNA, 25 bp, Homo sapiens
gatggtacgtatttgaccaaagcag

SEQ ID NO: 5562 - DNA, 25 bp, Homo sapiens
taaagatggaatcgtaaaactcaat

SEQ ID NO: 5563 - DNA, 25 bp, Homo sapiens
gagtccagttacaaggtggaactag

SEQ ID NO: 5564 - DNA, 25 bp, Homo sapiens
gaggtatatgttgcaggatccagga

SEQ ID NO: 5565 - DNA, 25 bp, Homo sapiens
aggctgggactcaagtgcggcccca

SEQ ID NO: 5566 - DNA, 25 bp, Homo sapiens
atatgaaataaagcccacagtaaag

SEQ ID NO: 5567 - DNA, 25 bp, Homo sapiens
ttaaaaccatccactaaatgactga

SEQ ID NO: 5568 - DNA, 25 bp, Homo sapiens
taatcctttggcagtgaaaaccctg

SEQ ID NO: 5569 - DNA, 25 bp, Homo sapiens
tccagcgtggctttgagttgcagcg

SEQ ID NO: 5570 - DNA, 25 bp, Homo sapiens
ccagtgtggctgtattgatggaagc

SEQ ID NO: 5571 - DNA, 25 bp, Homo sapiens
gaagtggctgcagactccatagagg

SEQ ID NO: 5572 - DNA, 25 bp, Homo sapiens
ttccttcaacttgggtggtcaggga

SEQ ID NO: 5573 - DNA, 25 bp, Homo sapiens
caggtccagctttactcttcccaag

SEQ ID NO: 5574 - DNA, 25 bp, Homo sapiens
ggtgtctggatccaaggtcgccacg

SEQ ID NO: 5575 - DNA, 25 bp, Homo sapiens
caataataagtgacccagggagact

SEQ ID NO: 5576 - DNA, 25 bp, Homo sapiens
tgccatttctactatccaagtacta

SEQ ID NO: 5577 - DNA, 25 bp, Homo sapiens
taacaatcccaaatgtgcatgcacc

SEQ ID NO: 5578 - DNA, 25 bp, Homo sapiens
ttttacttcccacgcgcatctggca

SEQ ID NO: 5579 - DNA, 25 bp, Homo sapiens
tggctcggtgactcgctggctaggt

SEQ ID NO: 5580 - DNA, 25 bp, Homo sapiens
ttcaggtcgccatggaatcagcaca

SEQ ID NO: 5581 - DNA, 25 bp, Homo sapiens
cttttgatgtagacaggtacctcag

SEQ ID NO: 5582 - DNA, 25 bp, Homo sapiens
tgtatgagattctgaaggccctgga

SEQ ID NO: 5583 - DNA, 25 bp, Homo sapiens
cagccttgatcagaggatccccgtt

SEQ ID NO: 5584 - DNA, 25 bp, Homo sapiens
ttagcccatttgaagagaagccaca

SEQ ID NO: 5585 - DNA, 25 bp, Homo sapiens
gactgtctgcatcgaaggccctgat

SEQ ID NO: 5586 - DNA, 25 bp, Homo sapiens
gagaacagcacgacttctccattac

SEQ ID NO: 5587 - DNA, 25 bp, Homo sapiens
tgttctagaaccagaccttaactga

SEQ ID NO: 5588 - DNA, 25 bp, Homo sapiens
ggcgaggtgcacttcgcggcgtcac

SEQ ID NO: 5589 - DNA, 25 bp, Homo sapiens
gttggtgaccaacattctagatctt

SEQ ID NO: 5590 - DNA, 25 bp, Homo sapiens
tgaagaatccctgctcacaaggaat

SEQ ID NO: 5591 - DNA, 25 bp, Homo sapiens
gatctgtcctgggttcagccaaggg

SEQ ID NO: 5592 - DNA, 25 bp, Homo sapiens
taaatcagcctgtcaagaaggaagg

SEQ ID NO: 5593 - DNA, 25 bp, Homo sapiens
caagatgtcatgcattgacttctct

SEQ ID NO: 5594 - DNA, 25 bp, Homo sapiens
aaaaagatgaaacgcatcatgaatt

SEQ ID NO: 5595 - DNA, 25 bp, Homo sapiens
gagcctcggcggcaaaaaccagcgg

SEQ ID NO: 5596 - DNA, 25 bp, Homo sapiens
ggcggggcggcgcgccaagggccgg

SEQ ID NO: 5597 - DNA, 25 bp, Homo sapiens
cctatacaaatttcgctgggcaggg

SEQ ID NO: 5598 - DNA, 25 bp, Homo sapiens
cgttctgctgcattgcttttgcgca

SEQ ID NO: 5599 - DNA, 25 bp, Homo sapiens
agtccagatcaccacagaaccggaa

SEQ ID NO: 5600 - DNA, 25 bp, Homo sapiens
taatcctctgcctgtctgtgttctc

SEQ ID NO: 5601 - DNA, 25 bp, Homo sapiens
gaagatgacgtcttctttgctggcg

SEQ ID NO: 5602 - DNA, 25 bp, Homo sapiens
ggcaaaccaggatgcttggtgaccc

SEQ ID NO: 5603 - DNA, 25 bp, Homo sapiens
gacatcctcccattatatagtcaag

SEQ ID NO: 5604 - DNA, 25 bp, Homo sapiens
taattccagcagaagactgatcacc

SEQ ID NO: 5605 - DNA, 25 bp, Homo sapiens
gtctcaccggtgttctttttctcag

SEQ ID NO: 5606 - DNA, 25 bp, Homo sapiens
agggagccgcagtgccttcgcctca

SEQ ID NO: 5607 - DNA, 25 bp, Homo sapiens
gaaatgaaaggtgggagagcaatct

SEQ ID NO: 5608 - DNA, 25 bp, Homo sapiens
ctgttgttctaagttaatcggtttg

SEQ ID NO: 5609 - DNA, 25 bp, Homo sapiens
tagccgtgagtcatcagcagacaac

SEQ ID NO: 5610 - DNA, 25 bp, Homo sapiens
cttcgaccttcataggtctgctgtt

SEQ ID NO: 5611 - DNA, 25 bp, Homo sapiens
gaaaagttctctccttgcgcagcca

SEQ ID NO: 5612 - DNA, 25 bp, Homo sapiens
cagtgttgcgggcttgagcaagacc

SEQ ID NO: 5613 - DNA, 25 bp, Homo sapiens
tctgtaggtcagcttgaaatcatca

SEQ ID NO: 5614 - DNA, 25 bp, Homo sapiens
acatgtcccaaactcatgcagacat

SEQ ID NO: 5615 - DNA, 25 bp, Homo sapiens
tctgacccaagtcgatccggtgagt

SEQ ID NO: 5616 - DNA, 25 bp, Homo sapiens
gatggatgccttacttaaccctgct

SEQ ID NO: 5617 - DNA, 25 bp, Homo sapiens
gagagtagagaaagaacaaagaaat

SEQ ID NO: 5618 - DNA, 25 bp, Homo sapiens
gaagttacaatacgctgttcccatc

SEQ ID NO: 5619 - DNA, 25 bp, Homo sapiens
acaggttccgaggaacagccagcac

SEQ ID NO: 5620 - DNA, 25 bp, Homo sapiens
tttcaatacaaggagacggtctggc

SEQ ID NO: 5621 - DNA, 25 bp, Homo sapiens
ggtattcacttgatgtatctccagc

SEQ ID NO: 5622 - DNA, 25 bp, Homo sapiens
tccctttgggccaggtaatcctata

SEQ ID NO: 5623 - DNA, 25 bp, Homo sapiens
gagtacttgaggtaggtgcgcccat

SEQ ID NO: 5624 - DNA, 25 bp, Homo sapiens
ggtctcagttccaagccttcatctt

SEQ ID NO: 5625 - DNA, 25 bp, Homo sapiens
gaggccattactagatagtctgatt

SEQ ID NO: 5626 - DNA, 25 bp, Homo sapiens
tacgctgagtatttggccaagtcgc

SEQ ID NO: 5627 - DNA, 25 bp, Homo sapiens
ttttcacaagggtcataaatgccag

SEQ ID NO: 5628 - DNA, 25 bp, Homo sapiens
tatgctgtcatacctaatacactat

SEQ ID NO: 5629 - DNA, 25 bp, Homo sapiens
ccacaccttgtgatgcagaatgccc

SEQ ID NO: 5630 - DNA, 25 bp, Homo sapiens
gatttcctccaacgtgccacgttct

SEQ ID NO: 5631 - DNA, 25 bp, Homo sapiens
gatagtcaagatacttttcagccac

SEQ ID NO: 5632 - DNA, 25 bp, Homo sapiens
catgaccagatcttcaatatgaggg

SEQ ID NO: 5633 - DNA, 25 bp, Homo sapiens
ctgggtaagaatgtaactcctttgg

SEQ ID NO: 5634 - DNA, 25 bp, Homo sapiens
ctttgggaaaaacaggtatggcatt

SEQ ID NO: 5635 - DNA, 25 bp, Homo sapiens
tagggcaaaattgaactgcgcagcc

SEQ ID NO: 5636 - DNA, 25 bp, Homo sapiens
gagccatcgccactacaggtgatga

SEQ ID NO: 5637 - DNA, 25 bp, Homo sapiens
tggtttgaacaaaacccactgcatt

SEQ ID NO: 5638 - DNA, 25 bp, Homo sapiens
gatagctggaccaggcggcatctgc

SEQ ID NO: 5639 - DNA, 25 bp, Homo sapiens
tccaagggcctcaattctctgcttt

SEQ ID NO: 5640 - DNA, 25 bp, Homo sapiens
actttagaaagggagggattgccag

SEQ ID NO: 5641 - DNA, 25 bp, Homo sapiens
gaaggagtctagaatatgttcagca

SEQ ID NO: 5642 - DNA, 25 bp, Homo sapiens
gagccattacttcaagatcatcgag

SEQ ID NO: 5643 - DNA, 25 bp, Homo sapiens
tttgagggagtctattgttaaacta

SEQ ID NO: 5644 - DNA, 25 bp, Homo sapiens
cagttaccaaggtatgaagtcggtc

SEQ ID NO: 5645 - DNA, 25 bp, Homo sapiens
taatcagtgtagtcccagacctggg

SEQ ID NO: 5646 - DNA, 25 bp, Homo sapiens
gatcggtgtggtcaaatggcactgc

SEQ ID NO: 5647 - DNA, 25 bp, Homo sapiens
tcaggatgacgtgcagaaaaatggg

SEQ ID NO: 5648 - DNA, 25 bp, Homo sapiens
gccagaagtggtagcatatgcccat

SEQ ID NO: 5649 - DNA, 25 bp, Homo sapiens
tgctcaagctttgcatccaccagct

SEQ ID NO: 5650 - DNA, 25 bp, Homo sapiens
tggaattctctgcaggccgctagca

SEQ ID NO: 5651 - DNA, 25 bp, Homo sapiens
tgatttccatccaaccagagatctt

SEQ ID NO: 5652 - DNA, 25 bp, Homo sapiens
ggcactgacagtttcttctagagac

SEQ ID NO: 5653 - DNA, 25 bp, Homo sapiens
tagacccagggctgctgtttgtcgg

SEQ ID NO: 5654 - DNA, 25 bp, Homo sapiens
tttatgtcatgttcccacctcgagg

SEQ ID NO: 5655 - DNA, 25 bp, Homo sapiens
ctccggctccgggatcaggcttggc

SEQ ID NO: 5656 - DNA, 25 bp, Homo sapiens
gggttggccacagttcgccgcttca

SEQ ID NO: 5657 - DNA, 25 bp, Homo sapiens
caaagtacaaatcccaagagccttc

SEQ ID NO: 5658 - DNA, 25 bp, Homo sapiens
tcagactttcttcagggatttttat

SEQ ID NO: 5659 - DNA, 25 bp, Homo sapiens
tattcataagcagttgggcagaccc

SEQ ID NO: 5660 - DNA, 25 bp, Homo sapiens
ggtccataatgctggtgggcaaagt

SEQ ID NO: 5661 - DNA, 25 bp, Homo sapiens
gcgtgcgtcccgacgtatcagactc

SEQ ID NO: 5662 - DNA, 25 bp, Homo sapiens
tgagcccatctgtagagacacaaac

SEQ ID NO: 5663 - DNA, 25 bp, Homo sapiens
gaaaccgccacatttttcaggctga

SEQ ID NO: 5664 - DNA, 25 bp, Homo sapiens
taggtaaattaagctagccattcct

SEQ ID NO: 5665 - DNA, 25 bp, Homo sapiens
aagccgcagacctgcacagtcagtc

SEQ ID NO: 5666 - DNA, 25 bp, Homo sapiens
cagaaaatggtagagaccaaaagac

SEQ ID NO: 5667 - DNA, 25 bp, Homo sapiens
tcactgcgcacgtactggtgaccca

SEQ ID NO: 5668 - DNA, 25 bp, Homo sapiens
gggaatgttgccctcattactggca

SEQ ID NO: 5669 - DNA, 25 bp, Homo sapiens
aacatgccactaagcctgagtcgtg

SEQ ID NO: 5670 - DNA, 25 bp, Homo sapiens
tgtttgttcacgacttccagccggt

SEQ ID NO: 5671 - DNA, 25 bp, Homo sapiens
gacagatccatcatatcccggcaaa

SEQ ID NO: 5672 - DNA, 25 bp, Homo sapiens
gtggtgcatggtcctcagaaactcc

SEQ ID NO: 5673 - DNA, 25 bp, Homo sapiens
gaagaattcctagccaacaagcact

SEQ ID NO: 5674 - DNA, 25 bp, Homo sapiens
tactgtaagttttgcctaaattcca

SEQ ID NO: 5675 - DNA, 25 bp, Homo sapiens
gatcatctcagtcccgatgtcatgg

SEQ ID NO: 5676 - DNA, 25 bp, Homo sapiens
ggtaatggaatgaggctgacttcct

SEQ ID NO: 5677 - DNA, 25 bp, Homo sapiens
acttctactgcttgggtcactgaca

SEQ ID NO: 5678 - DNA, 25 bp, Homo sapiens
tacacataatggactagaccctgct

SEQ ID NO: 5679 - DNA, 25 bp, Homo sapiens
gagttttttgaacccatctgagccg

SEQ ID NO: 5680 - DNA, 25 bp, Homo sapiens
acctcctcagcatagaaaaccacag

SEQ ID NO: 5681 - DNA, 25 bp, Homo sapiens
gccagataatgaagatgcgaccgaa

SEQ ID NO: 5682 - DNA, 25 bp, Homo sapiens
cactttaaggagcatggccacagcc

SEQ ID NO: 5683 - DNA, 25 bp, Homo sapiens
gctgtggcatttccaaacatccaaa

SEQ ID NO: 5684 - DNA, 25 bp, Homo sapiens
tggcggcgctgatgtaactgctgac

SEQ ID NO: 5685 - DNA, 25 bp, Homo sapiens
tgtatggcgtctgcgagttatcctc

SEQ ID NO: 5686 - DNA, 25 bp, Homo sapiens
catatgagaagatgctgcgagacca

SEQ ID NO: 5687 - DNA, 25 bp, Homo sapiens
gagaccaggtcctgctctagcggtt

SEQ ID NO: 5688 - DNA, 25 bp, Homo sapiens
tctgattagagactttggcacgtgt

SEQ ID NO: 5689 - DNA, 25 bp, Homo sapiens
tatgaattggctgacgagacccacc

SEQ ID NO: 5690 - DNA, 25 bp, Homo sapiens
gatcataaaaaggttcagagggtgg

SEQ ID NO: 5691 - DNA, 25 bp, Homo sapiens
gctgtgtgcaacgtgcagagtccca

SEQ ID NO: 5692 - DNA, 25 bp, Homo sapiens
gcacctctgggctcaaagcggtttg

SEQ ID NO: 5693 - DNA, 25 bp, Homo sapiens
tccagccggaagtgacaaaaagaca

SEQ ID NO: 5694 - DNA, 25 bp, Homo sapiens
aatatttgtaatacgatatagttac

SEQ ID NO: 5695 - DNA, 25 bp, Homo sapiens
gatatgatgatgacttccccactga

SEQ ID NO: 5696 - DNA, 25 bp, Homo sapiens
tatctgaagacatcagcacggacca

SEQ ID NO: 5697 - DNA, 25 bp, Homo sapiens
gcgcggctctggactggtaaatgat

SEQ ID NO: 5698 - DNA, 25 bp, Homo sapiens
ggatctccgtagatacgcgccaccc

SEQ ID NO: 5699 - DNA, 25 bp, Homo sapiens
tgcagcctgagtgagagcatgagac

SEQ ID NO: 5700 - DNA, 25 bp, Homo sapiens
tgagaagtgtggtcctcgactccaa

SEQ ID NO: 5701 - DNA, 25 bp, Homo sapiens
cctggaaataccagaccatgtctta

SEQ ID NO: 5702 - DNA, 25 bp, Homo sapiens
aaatgtgtggacaaaaacccatggc

SEQ ID NO: 5703 - DNA, 25 bp, Homo sapiens
tgggagaatttctttttcatccgga

SEQ ID NO: 5704 - DNA, 25 bp, Homo sapiens
gatcctcaggaatcgtgacaggaca

SEQ ID NO: 5705 - DNA, 25 bp, Homo sapiens
gtaagtaagacgtaggcatctccat

SEQ ID NO: 5706 - DNA, 25 bp, Homo sapiens
acatataacaccatccacactaaca

SEQ ID NO: 5707 - DNA, 25 bp, Homo sapiens
tcttccctggaaacctcaatgcggc

SEQ ID NO: 5708 - DNA, 25 bp, Homo sapiens
gaagatttgccagacgctcataatg

SEQ ID NO: 5709 - DNA, 25 bp, Homo sapiens
ctgttctcgatgctcagggcgcggt

SEQ ID NO: 5710 - DNA, 25 bp, Homo sapiens
caagacttcaatcctgaacaacagc

SEQ ID NO: 5711 - DNA, 25 bp, Homo sapiens
tcagccatgctgtaggaagaatccc

SEQ ID NO: 5712 - DNA, 25 bp, Homo sapiens
tagtaaccctcacagctcgttggtg

SEQ ID NO: 5713 - DNA, 25 bp, Homo sapiens
gccggagggaccttctgctgagcca

SEQ ID NO: 5714 - DNA, 25 bp, Homo sapiens
tatgaaggtcagttcagtcccacca

SEQ ID NO: 5715 - DNA, 25 bp, Homo sapiens
ctgtgggacgagctgaaagacttgt

SEQ ID NO: 5716 - DNA, 25 bp, Homo sapiens
gccctgctcaccgcaggccaccacc

SEQ ID NO: 5717 - DNA, 25 bp, Homo sapiens
ggcctccgtagccactgcagctttt

SEQ ID NO: 5718 - DNA, 25 bp, Homo sapiens
ccttcatttacagagtgggcagccc

SEQ ID NO: 5719 - DNA, 25 bp, Homo sapiens
tcttcacccgggaggagcgccattc

SEQ ID NO: 5720 - DNA, 25 bp, Homo sapiens
cgttttgcatgaagacactgcagca

SEQ ID NO: 5721 - DNA, 25 bp, Homo sapiens
tccaagctgtgaagaagcgtgtccc

SEQ ID NO: 5722 - DNA, 25 bp, Homo sapiens
taagatggttgccaggatgtcgcct

SEQ ID NO: 5723 - DNA, 25 bp, Homo sapiens
cctgacctaacaaagcaatggattc

SEQ ID NO: 5724 - DNA, 25 bp, Homo sapiens
caataatcacaccttggaggaacct

SEQ ID NO: 5725 - DNA, 25 bp, Homo sapiens
ttctcgtcatagtcgtgagaggtga

SEQ ID NO: 5726 - DNA, 25 bp, Homo sapiens
cggttaacgcactctgtacctggat

SEQ ID NO: 5727 - DNA, 25 bp, Homo sapiens
aatggaacattataagctgcaggac

SEQ ID NO: 5728 - DNA, 25 bp, Homo sapiens
tcagcatgcgtagttccaagaagcc

SEQ ID NO: 5729 - DNA, 25 bp, Homo sapiens
tcagtggattggaatctaaaatggc

SEQ ID NO: 5730 - DNA, 25 bp, Homo sapiens
ggcactgcgaccactaaaactgtaa

SEQ ID NO: 5731 - DNA, 25 bp, Homo sapiens
ctaatggtaactatgtagccacatc

SEQ ID NO: 5732 - DNA, 25 bp, Homo sapiens
gttggagtaaacacccgcggcatag

SEQ ID NO: 5733 - DNA, 25 bp, Homo sapiens
acaaagttagggttgatgggaccag

SEQ ID NO: 5734 - DNA, 25 bp, Homo sapiens
ggccgtgttggcaagacgcctcatc

SEQ ID NO: 5735 - DNA, 25 bp, Homo sapiens
tagatgcaaaacaaacaatagaggc

SEQ ID NO: 5736 - DNA, 25 bp, Homo sapiens
ctccaagtccagtaataacaacaag

SEQ ID NO: 5737 - DNA, 25 bp, Homo sapiens
taccaccagtcgaagttgtagcggg

SEQ ID NO: 5738 - DNA, 25 bp, Homo sapiens
tagtatcattcagaattgcccggat

SEQ ID NO: 5739 - DNA, 25 bp, Homo sapiens
ctggcccacaaccacgccgataatg

SEQ ID NO: 5740 - DNA, 25 bp, Homo sapiens
tcttcctcgggctggtccaagatgg

SEQ ID NO: 5741 - DNA, 25 bp, Homo sapiens
caccaccacgggtgacaccaggatg

SEQ ID NO: 5742 - DNA, 25 bp, Homo sapiens
gacacacacgggaagtgttctccaa

SEQ ID NO: 5743 - DNA, 25 bp, Homo sapiens
gagccgcgggtcgacgcacgcacgt

SEQ ID NO: 5744 - DNA, 25 bp, Homo sapiens
cctctgagagggtttccttggtatc

SEQ ID NO: 5745 - DNA, 25 bp, Homo sapiens
gagctcagagggtctccaggtaaca

SEQ ID NO: 5746 - DNA, 25 bp, Homo sapiens
gaaatagggtctttaccactggcca

SEQ ID NO: 5747 - DNA, 25 bp, Homo sapiens
tgatagatgagggtcatcactgcgc

SEQ ID NO: 5748 - DNA, 25 bp, Homo sapiens
cagacggctgggtggcaaatacaaa

SEQ ID NO: 5749 - DNA, 25 bp, Homo sapiens
cctgtgtgtgggtgcacatttgtgt

SEQ ID NO: 5750 - DNA, 25 bp, Homo sapiens
ttctggatgggtgcaggctgtacca

SEQ ID NO: 5751 - DNA, 25 bp, Homo sapiens
catgcgaatccggtcagaactggtc

SEQ ID NO: 5752 - DNA, 25 bp, Homo sapiens
cttccagaagggcaacaagcgaggt

SEQ ID NO: 5753 - DNA, 25 bp, Homo sapiens
cttgaaggcagggacgtgactttcc

SEQ ID NO: 5754 - DNA, 25 bp, Homo sapiens
ggcttagagggagacacatctcaga

SEQ ID NO: 5755 - DNA, 25 bp, Homo sapiens
aatgatctgcaaggtctcagtcccc

SEQ ID NO: 5756 - DNA, 25 bp, Homo sapiens
ctaggaaaggtgagcgcgatctcgc

SEQ ID NO: 5757 - DNA, 25 bp, Homo sapiens
gcggcgtcaggtggcggctgccgca

SEQ ID NO: 5758 - DNA, 25 bp, Homo sapiens
gagaggcacaggtttcaagacacat

SEQ ID NO: 5759 - DNA, 25 bp, Homo sapiens
tcaggtctgggaagcactgaccagc

SEQ ID NO: 5760 - DNA, 25 bp, Homo sapiens
tattctctgggagtgactcagtgcc

SEQ ID NO: 5761 - DNA, 25 bp, Homo sapiens
tccaggctgggagagtgctcaccta

SEQ ID NO: 5762 - DNA, 25 bp, Homo sapiens
catgtgtgtccggaagtgtgtgccc

SEQ ID NO: 5763 - DNA, 25 bp, Homo sapiens
tctcaaagggatttcaagatgctgt

SEQ ID NO: 5764 - DNA, 25 bp, Homo sapiens
cagtgcggagcggagtcggttctgg

SEQ ID NO: 5765 - DNA, 25 bp, Homo sapiens
cctggcccggatggtgctggctcca

SEQ ID NO: 5766 - DNA, 25 bp, Homo sapiens
tgctggtcgcggatctgctgtacct

SEQ ID NO: 5767 - DNA, 25 bp, Homo sapiens
tgaggcaggaggaaagacctacttc

SEQ ID NO: 5768 - DNA, 25 bp, Homo sapiens
caatgcctggaggagtgtagccgtc

SEQ ID NO: 5769 - DNA, 25 bp, Homo sapiens
ccaagccacaggagcttagcacagt

SEQ ID NO: 5770 - DNA, 25 bp, Homo sapiens
ccagaggtgcaggagcaagttcaca

SEQ ID NO: 5771 - DNA, 25 bp, Homo sapiens
gaagaacaggattggccagatgcgt

SEQ ID NO: 5772 - DNA, 25 bp, Homo sapiens
aaattcgaggatggcctatctcaca

SEQ ID NO: 5773 - DNA, 25 bp, Homo sapiens
ttaggatgtggtgaggagaagctgc

SEQ ID NO: 5774 - DNA, 25 bp, Homo sapiens
tctggtgtgtggaaactgacggtgg

SEQ ID NO: 5775 - DNA, 25 bp, Homo sapiens
ttaggccaggctgtagctggtcctc

SEQ ID NO: 5776 - DNA, 25 bp, Homo sapiens
ggcgtgctgaggctgaaaatggcat

SEQ ID NO: 5777 - DNA, 25 bp, Homo sapiens
ttctcaagggcaataaagttaggca

SEQ ID NO: 5778 - DNA, 25 bp, Homo sapiens
gctaaccggcaatttgataccaaag

SEQ ID NO: 5779 - DNA, 25 bp, Homo sapiens
caaaaatgggcaggagcacagtgac

SEQ ID NO: 5780 - DNA, 25 bp, Homo sapiens
tgttgttgtggcaggagcactccag

SEQ ID NO: 5781 - DNA, 25 bp, Homo sapiens
aggcagcgacccactaccttgtact

SEQ ID NO: 5782 - DNA, 25 bp, Homo sapiens
ggccagcaaccaactcacaaatact

SEQ ID NO: 5783 - DNA, 25 bp, Homo sapiens
taagggtcctgtggtggtctcccga

SEQ ID NO: 5784 - DNA, 25 bp, Homo sapiens
taggccaatccctcacacaggttaa

SEQ ID NO: 5785 - DNA, 25 bp, Homo sapiens
gctcctgtcatccttgcctcttggg

SEQ ID NO: 5786 - DNA, 25 bp, Homo sapiens
agaacttctccagggcgctggcaca

SEQ ID NO: 5787 - DNA, 25 bp, Homo sapiens
agttcttgatccagcgctgctccca

SEQ ID NO: 5788 - DNA, 25 bp, Homo sapiens
cgcgccgggccgacccgcatctccc

SEQ ID NO: 5789 - DNA, 25 bp, Homo sapiens
gggcagaacggagctatccatccag

SEQ ID NO: 5790 - DNA, 25 bp, Homo sapiens
cggtgacgccgatcctgtgagcatt

SEQ ID NO: 5791 - DNA, 25 bp, Homo sapiens
gagagttacgcgaaaggagtcctcc

SEQ ID NO: 5792 - DNA, 25 bp, Homo sapiens
tgctgcgtccgttgaagcaaccgcc

SEQ ID NO: 5793 - DNA, 25 bp, Homo sapiens
caggcctgccgtctatagtctatgg

SEQ ID NO: 5794 - DNA, 25 bp, Homo sapiens
cgtgcagtggttggaagcatcagct

SEQ ID NO: 5795 - DNA, 25 bp, Homo sapiens
gcatagatgtttgcctcctcttgga

SEQ ID NO: 5796 - DNA, 25 bp, Homo sapiens
ttgatgaaggtgtcacaacggcaag

SEQ ID NO: 5797 - DNA, 25 bp, Homo sapiens
caggtagaggtgtgaccccaggact

SEQ ID NO: 5798 - DNA, 25 bp, Homo sapiens
caggatggtggtgatcaacgtgccc

SEQ ID NO: 5799 - DNA, 25 bp, Homo sapiens
ctgggagactgtgggtgatcctcca

SEQ ID NO: 5800 - DNA, 25 bp, Homo sapiens
ctattgggtgtgttgtaaacagaag

SEQ ID NO: 5801 - DNA, 25 bp, Homo sapiens
tgtttgtctgtgcttctaaaaggtc

SEQ ID NO: 5802 - DNA, 25 bp, Homo sapiens
gccaggcagcctataggaatagtaa

SEQ ID NO: 5803 - DNA, 25 bp, Homo sapiens
gctagcccactccacagatttttga

SEQ ID NO: 5804 - DNA, 25 bp, Homo sapiens
taagggtgctatgcgctcagtctcc

SEQ ID NO: 5805 - DNA, 25 bp, Homo sapiens
cgtttccctgtgtgaggtggtgcca

SEQ ID NO: 5806 - DNA, 25 bp, Homo sapiens
caagagacatgcataacacgtttta

SEQ ID NO: 5807 - DNA, 25 bp, Homo sapiens
catttattgaacaagctagcctgtt

SEQ ID NO: 5808 - DNA, 25 bp, Homo sapiens
tggatctcaggaaagctgccagcat

SEQ ID NO: 5809 - DNA, 25 bp, Homo sapiens
tctctgcccaaggtgagggaactca

SEQ ID NO: 5810 - DNA, 25 bp, Homo sapiens
gctgcatgttcatagtcatccacct

SEQ ID NO: 5811 - DNA, 25 bp, Homo sapiens
ttcttaaagcaccacatcaacctta

SEQ ID NO: 5812 - DNA, 25 bp, Homo sapiens
tgtatcacaggagaaaccagcaggg

SEQ ID NO: 5813 - DNA, 25 bp, Homo sapiens
gggccacagatcaggtgcttctgca

SEQ ID NO: 5814 - DNA, 25 bp, Homo sapiens
ccttctccagatgacgtggctgtca

SEQ ID NO: 5815 - DNA, 25 bp, Homo sapiens
tgggccatacggtagtatttagttg

SEQ ID NO: 5816 - DNA, 25 bp, Homo sapiens
ccctgttgcgggtgaggcggctgct

SEQ ID NO: 5817 - DNA, 25 bp, Homo sapiens
cttcgtgcagcgggtcagttaatct

SEQ ID NO: 5818 - DNA, 25 bp, Homo sapiens
gactggctgggttctcagttggagc

SEQ ID NO: 5819 - DNA, 25 bp, Homo sapiens
tagccttgggtacacacacatcctt

SEQ ID NO: 5820 - DNA, 25 bp, Homo sapiens
cggccctgggtctggttggtgaagc

SEQ ID NO: 5821 - DNA, 25 bp, Homo sapiens
caccaaagggtcgtggctgctgaca

SEQ ID NO: 5822 - DNA, 25 bp, Homo sapiens
tcagaggcagggtcatggaggttcc

SEQ ID NO: 5823 - DNA, 25 bp, Homo sapiens
ctccccgggtgtgagcatggtagaa

SEQ ID NO: 5824 - DNA, 25 bp, Homo sapiens
tccccagggtgacggctgctgtgaa

SEQ ID NO: 5825 - DNA, 25 bp, Homo sapiens
tggtgttgggtgcatcctgcgccac

SEQ ID NO: 5826 - DNA, 25 bp, Homo sapiens
cgcggcgcgcggtcgacggtcggtc

SEQ ID NO: 5827 - DNA, 25 bp, Homo sapiens
taggcggcggttcgtcccgctccat

SEQ ID NO: 5828 - DNA, 25 bp, Homo sapiens
tggtgatgacggtcccactaggaac

SEQ ID NO: 5829 - DNA, 25 bp, Homo sapiens
gtatgcggcggtcggcctacccccg

SEQ ID NO: 5830 - DNA, 25 bp, Homo sapiens
ccgtgcggcggtagctgttcttctc

SEQ ID NO: 5831 - DNA, 25 bp, Homo sapiens
tatgcggtgcggtgtacgttctgcc

SEQ ID NO: 5832 - DNA, 25 bp, Homo sapiens
cctagcggcggtgacttttttggcg

SEQ ID NO: 5833 - DNA, 25 bp, Homo sapiens
gcgcgcggcggtcgaacgtggtggg

SEQ ID NO: 5834 - DNA, 25 bp, Homo sapiens
tacctgtgcggttgtgcggcgttct

SEQ ID NO: 5835 - DNA, 25 bp, Homo sapiens
tctctgtggcggtggcttagcactc

SEQ ID NO: 5836 - DNA, 25 bp, Homo sapiens
atttcccggtgtgtggcgtgacatg

SEQ ID NO: 5837 - DNA, 25 bp, Homo sapiens
cacaccacacggtggcctttttcag

SEQ ID NO: 5838 - DNA, 25 bp, Homo sapiens
ccaattacggtggtggctgttgtac

SEQ ID NO: 5839 - DNA, 25 bp, Homo sapiens
ctggtggtgcggtgctgctcatcaa

SEQ ID NO: 5840 - DNA, 25 bp, Homo sapiens
agcacgtgccggtgtgagccgttcc

SEQ ID NO: 5841 - DNA, 25 bp, Homo sapiens
tcatggctggcggtgagatcttcca

SEQ ID NO: 5842 - DNA, 25 bp, Homo sapiens
tcccaagcggtgtggtgtggacctc

SEQ ID NO: 5843 - DNA, 25 bp, Homo sapiens
cagcacacagcacggtgagtcgcat

SEQ ID NO: 5844 - DNA, 25 bp, Homo sapiens
ctcaatgaggcggtgctgcagtttc

SEQ ID NO: 5845 - DNA, 25 bp, Homo sapiens
ctttggcaagggctacggtggagtt

SEQ ID NO: 5846 - DNA, 25 bp, Homo sapiens
gcagctgagcaagggcaagctttcg

SEQ ID NO: 5847 - DNA, 25 bp, Homo sapiens
aggagacgagggagcccaacatgtt

SEQ ID NO: 5848 - DNA, 25 bp, Homo sapiens
acccagtgagggcatgtggctgcac

SEQ ID NO: 5849 - DNA, 25 bp, Homo sapiens
tatcacccagggaatacgtaaccag

SEQ ID NO: 5850 - DNA, 25 bp, Homo sapiens
tttctctgagggtgctggtgccatc

SEQ ID NO: 5851 - DNA, 25 bp, Homo sapiens
cagggtgccagggttcttgtacttt

SEQ ID NO: 5852 - DNA, 25 bp, Homo sapiens
agacggacagggtgcgtgccctcat

SEQ ID NO: 5853 - DNA, 25 bp, Homo sapiens
cttgggcgcagggtgctcagcttct

SEQ ID NO: 5854 - DNA, 25 bp, Homo sapiens
cttaaggcagggcatctggagctat

SEQ ID NO: 5855 - DNA, 25 bp, Homo sapiens
cacacaggctgcagggcaagaggct

SEQ ID NO: 5856 - DNA, 25 bp, Homo sapiens
agctgcctggaggtcccgcagtaga

SEQ ID NO: 5857 - DNA, 25 bp, Homo sapiens
tgggtctgaggttgctccacatctg

SEQ ID NO: 5858 - DNA, 25 bp, Homo sapiens
ccagggctgaggtgattctgctacc

SEQ ID NO: 5859 - DNA, 25 bp, Homo sapiens
cagtgtcacaaggtgtggcttgagc

SEQ ID NO: 5860 - DNA, 25 bp, Homo sapiens
cgacagatataggtgtgtgtgtaca

SEQ ID NO: 5861 - DNA, 25 bp, Homo sapiens
gaggcagcataggtgtccacaagct

SEQ ID NO: 5862 - DNA, 25 bp, Homo sapiens
tcctgcgacaggttcaggtaggccg

SEQ ID NO: 5863 - DNA, 25 bp, Homo sapiens
ttgtgcgcagaggtggtgccgggcc

SEQ ID NO: 5864 - DNA, 25 bp, Homo sapiens
tcagctccgaggtgatgccagagcc

SEQ ID NO: 5865 - DNA, 25 bp, Homo sapiens
tgcttcttcaggtccgcgttctcgc

SEQ ID NO: 5866 - DNA, 25 bp, Homo sapiens
gggtgccaggtcctcaaataagaag

SEQ ID NO: 5867 - DNA, 25 bp, Homo sapiens
acaggcggcaggtgggtgctttcct

SEQ ID NO: 5868 - DNA, 25 bp, Homo sapiens
accgcgtgcaggtcggctcgcgtct

SEQ ID NO: 5869 - DNA, 25 bp, Homo sapiens
cgcggcgtcaggtggcggctgccgc

SEQ ID NO: 5870 - DNA, 25 bp, Homo sapiens
tgcggtggcaggtgtcacagccaaa

SEQ ID NO: 5871 - DNA, 25 bp, Homo sapiens
gcaggcttgcaggtgtcccgtgccc

SEQ ID NO: 5872 - DNA, 25 bp, Homo sapiens
tgtcgcggcaggtacacctgcaggt

SEQ ID NO: 5873 - DNA, 25 bp, Homo sapiens
gacatggagcaggtagtcacagcca

SEQ ID NO: 5874 - DNA, 25 bp, Homo sapiens
agactgcaggcaggtcagaggtccc

SEQ ID NO: 5875 - DNA, 25 bp, Homo sapiens
gtgtgtgtgcaggtacatatacaca

SEQ ID NO: 5876 - DNA, 25 bp, Homo sapiens
tagcttctgcaggtggtgctggatc

SEQ ID NO: 5877 - DNA, 25 bp, Homo sapiens
cacgaaggcaggtggtataaatcac

SEQ ID NO: 5878 - DNA, 25 bp, Homo sapiens
tgccaatgtgcaggtgtgtgtccag

SEQ ID NO: 5879 - DNA, 25 bp, Homo sapiens
tggtggctgggaaaataaggatccc

SEQ ID NO: 5880 - DNA, 25 bp, Homo sapiens
gctgggctgggaattcatagacacc

SEQ ID NO: 5881 - DNA, 25 bp, Homo sapiens
tgggagctgggactcgcaaacctca

SEQ ID NO: 5882 - DNA, 25 bp, Homo sapiens
tcagaggctgggagcgaagcagtgc

SEQ ID NO: 5883 - DNA, 25 bp, Homo sapiens
acacaccacggagaagatttggata

SEQ ID NO: 5884 - DNA, 25 bp, Homo sapiens
cacacacacacggaatgtgagaggg

SEQ ID NO: 5885 - DNA, 25 bp, Homo sapiens
tttcccggacttgctgctggctggc

SEQ ID NO: 5886 - DNA, 25 bp, Homo sapiens
tacagcaccggacacaaagttatgc

SEQ ID NO: 5887 - DNA, 25 bp, Homo sapiens
gctctggcgcggagagaatcggagt

SEQ ID NO: 5888 - DNA, 25 bp, Homo sapiens
tggctggtgcggacatcagaacata

SEQ ID NO: 5889 - DNA, 25 bp, Homo sapiens
tgcaaggatgggatgttcagaagaa

SEQ ID NO: 5890 - DNA, 25 bp, Homo sapiens
taggcaggaggacaaattcaagtga

SEQ ID NO: 5891 - DNA, 25 bp, Homo sapiens
gtaaataggacaccacatgcataag

SEQ ID NO: 5892 - DNA, 25 bp, Homo sapiens
tgcggtgtgaggagatgaattccca

SEQ ID NO: 5893 - DNA, 25 bp, Homo sapiens
cacactgggcaggagagggttaaac

SEQ ID NO: 5894 - DNA, 25 bp, Homo sapiens
gctgctcccaggaggcaggcaaata

SEQ ID NO: 5895 - DNA, 25 bp, Homo sapiens
tctaaccaggattgcctcagtgtcc

SEQ ID NO: 5896 - DNA, 25 bp, Homo sapiens
tagagtggcaggagcacagcctaag

SEQ ID NO: 5897 - DNA, 25 bp, Homo sapiens
agtcactggcaggagcaaccttcac

SEQ ID NO: 5898 - DNA, 25 bp, Homo sapiens
taagggcaggagtcccatgatgaga

SEQ ID NO: 5899 - DNA, 25 bp, Homo sapiens
ttgatcttaggatgccgggtgccca

SEQ ID NO: 5900 - DNA, 25 bp, Homo sapiens
tattaagtggtgctggtaaaaagag

SEQ ID NO: 5901 - DNA, 25 bp, Homo sapiens
gtgtgtgtgtgggtctacatacaca

SEQ ID NO: 5902 - DNA, 25 bp, Homo sapiens
aatggcagcagtgggtaacgcttcc

SEQ ID NO: 5903 - DNA, 25 bp, Homo sapiens
gtgcgtgtgtgggtgggtgcgcatt

SEQ ID NO: 5904 - DNA, 25 bp, Homo sapiens
ccaggatgcagtgggctattagcca

SEQ ID NO: 5905 - DNA, 25 bp, Homo sapiens
gcgcctgtgtgggtgcacatttgtg

SEQ ID NO: 5906 - DNA, 25 bp, Homo sapiens
ttgtgtgtgtgggtgcacatttgtg

SEQ ID NO: 5907 - DNA, 25 bp, Homo sapiens
ctgtgtgtgtgtgggtctacataca

SEQ ID NO: 5908 - DNA, 25 bp, Homo sapiens
gtgtgtctgtgggtctgcgcacata

SEQ ID NO: 5909 - DNA, 25 bp, Homo sapiens
agggtggctggtgctcgtatctaca

SEQ ID NO: 5910 - DNA, 25 bp, Homo sapiens
ttgattgtgtgggtgccccatttct

SEQ ID NO: 5911 - DNA, 25 bp, Homo sapiens
acccactgtgggctgcatgctgtgc

SEQ ID NO: 5912 - DNA, 25 bp, Homo sapiens
ggtgccctgggtgtcagctccagta

SEQ ID NO: 5913 - DNA, 25 bp, Homo sapiens
cggaacctgggtgcatttcattcat

SEQ ID NO: 5914 - DNA, 25 bp, Homo sapiens
actcaggtctgggttggctacaaag

SEQ ID NO: 5915 - DNA, 25 bp, Homo sapiens
atgctggggctgggtgttccgccct

SEQ ID NO: 5916 - DNA, 25 bp, Homo sapiens
tgggatggctgggttttctagtctc

SEQ ID NO: 5917 - DNA, 25 bp, Homo sapiens
tacagactaagtacataaacttcca

SEQ ID NO: 5918 - DNA, 25 bp, Homo sapiens
tgcaagggctgggatgaatgcttct

SEQ ID NO: 5919 - DNA, 25 bp, Homo sapiens
tacggcttggttctgcctggacgca

SEQ ID NO: 5920 - DNA, 25 bp, Homo sapiens
tcatcagtggtggttgtataccaac

SEQ ID NO: 5921 - DNA, 25 bp, Homo sapiens
caatttttggtggtggcgacaatcc

SEQ ID NO: 5922 - DNA, 25 bp, Homo sapiens
tcaggctgctgtggtaccagggcat

SEQ ID NO: 5923 - DNA, 25 bp, Homo sapiens
cagaagcagtgtggtctcgcaagtt

SEQ ID NO: 5924 - DNA, 25 bp, Homo sapiens
caaggcgttggtggcggttgcagcg

SEQ ID NO: 5925 - DNA, 25 bp, Homo sapiens
agcagccgtgtggtgtagctcagca

SEQ ID NO: 5926 - DNA, 25 bp, Homo sapiens
aacttggtggtgtccgtgagcctcg

SEQ ID NO: 5927 - DNA, 25 bp, Homo sapiens
ttttcttggtgagtgatggtcatcc

SEQ ID NO: 5928 - DNA, 25 bp, Homo sapiens
cttgtgtgtgtggtgcagctccgcc

SEQ ID NO: 5929 - DNA, 25 bp, Homo sapiens
cattcctgtgtggtggatggcaaca

SEQ ID NO: 5930 - DNA, 25 bp, Homo sapiens
gcagagggctggttacagaagcccc

SEQ ID NO: 5931 - DNA, 25 bp, Homo sapiens
tgcaatgggctggtgtgaacagttc

SEQ ID NO: 5932 - DNA, 25 bp, Homo sapiens
ggatcagctgctggtctgtggtcca

SEQ ID NO: 5933 - DNA, 25 bp, Homo sapiens
cacaggaagctggtgacggcgatga

SEQ ID NO: 5934 - DNA, 25 bp, Homo sapiens
gcagtgggctggtgccaccccgaac

SEQ ID NO: 5935 - DNA, 25 bp, Homo sapiens
aatcagggctggtgtgatatgtcca

SEQ ID NO: 5936 - DNA, 25 bp, Homo sapiens
cctctgtgtctggtgtgtggacccc

SEQ ID NO: 5937 - DNA, 25 bp, Homo sapiens
tccatagtctggtgtgtgtgcagaa

SEQ ID NO: 5938 - DNA, 25 bp, Homo sapiens
taaaggctggtgctcaggaaacctc

SEQ ID NO: 5939 - DNA, 25 bp, Homo sapiens
tgttgtctctggtggtgctgcatgt

SEQ ID NO: 5940 - DNA, 25 bp, Homo sapiens
caaggtggatgggttgttgcccact

SEQ ID NO: 5941 - DNA, 25 bp, Homo sapiens
cttcgggatgggttgtgaggtctca

SEQ ID NO: 5942 - DNA, 25 bp, Homo sapiens
gcgagggctggtgcttctgcccatc

SEQ ID NO: 5943 - DNA, 25 bp, Homo sapiens
actaagatgctggtggtgtgccaca

SEQ ID NO: 5944 - DNA, 25 bp, Homo sapiens
tctactgtgctggtgtggcgtcata

SEQ ID NO: 5945 - DNA, 25 bp, Homo sapiens
tcaaggtatgggtgtgctgtgctcc

SEQ ID NO: 5946 - DNA, 25 bp, Homo sapiens
tgtgtgtaatggtgtgtgtagtggt

SEQ ID NO: 5947 - DNA, 25 bp, Homo sapiens
ccatggatggatgggctgactcgta

SEQ ID NO: 5948 - DNA, 25 bp, Homo sapiens
gagctgtgtgcatgggcttctcccc

SEQ ID NO: 5949 - DNA, 25 bp, Homo sapiens
ttagtaatggtaggctgctgatggc

SEQ ID NO: 5950 - DNA, 25 bp, Homo sapiens
gcagtgtgagtggaaaagtaatgaa

SEQ ID NO: 5951 - DNA, 25 bp, Homo sapiens
tgtgtgcaggtggacgttcctttca

SEQ ID NO: 5952 - DNA, 25 bp, Homo sapiens
tccagggtggactgctgcgtgtact

SEQ ID NO: 5953 - DNA, 25 bp, Homo sapiens
gctagcgagtggaaagcaggcctct

SEQ ID NO: 5954 - DNA, 25 bp, Homo sapiens
tacagtggtggacaggcatccaagc

SEQ ID NO: 5955 - DNA, 25 bp, Homo sapiens
cacacaggagtggagtggacgtcct

SEQ ID NO: 5956 - DNA, 25 bp, Homo sapiens
caatagcagactggacaggaagata

SEQ ID NO: 5957 - DNA, 25 bp, Homo sapiens
gcctgggctggacctatgtgttcta

SEQ ID NO: 5958 - DNA, 25 bp, Homo sapiens
cagtgtgagcatctggacctagggc

SEQ ID NO: 5959 - DNA, 25 bp, Homo sapiens
ggctggtgctggacttcatcaacgc

SEQ ID NO: 5960 - DNA, 25 bp, Homo sapiens
ctggcaggttggatgcttgatgaaa

SEQ ID NO: 5961 - DNA, 25 bp, Homo sapiens
ccggtggctggattcacaaagactt

SEQ ID NO: 5962 - DNA, 25 bp, Homo sapiens
tgtaggctgctggatcgcaagtgca

SEQ ID NO: 5963 - DNA, 25 bp, Homo sapiens
tcttgccttggcggcccagcccgct

SEQ ID NO: 5964 - DNA, 25 bp, Homo sapiens
gcagagatggatggattcgatgcaa

SEQ ID NO: 5965 - DNA, 25 bp, Homo sapiens
gggatggatggactccgagcaccct

SEQ ID NO: 5966 - DNA, 25 bp, Homo sapiens
actactcagcatggaaacaagatga

SEQ ID NO: 5967 - DNA, 25 bp, Homo sapiens
agtggtggtggcctgacttctcatg

SEQ ID NO: 5968 - DNA, 25 bp, Homo sapiens
gtgcggcgggcccgtaagttcgcct

SEQ ID NO: 5969 - DNA, 25 bp, Homo sapiens
actggcaggtggcacataggtgacc

SEQ ID NO: 5970 - DNA, 25 bp, Homo sapiens
tcttggctgggcctcttggcagaaa

SEQ ID NO: 5971 - DNA, 25 bp, Homo sapiens
tgggacagggccttccgaatggtgt

SEQ ID NO: 5972 - DNA, 25 bp, Homo sapiens
tcttggtgggcgtgcctgcatcact

SEQ ID NO: 5973 - DNA, 25 bp, Homo sapiens
tcgtcggcggcgagcagatcctgaa

SEQ ID NO: 5974 - DNA, 25 bp, Homo sapiens
ggcggccggcggacggcgtcgggga

SEQ ID NO: 5975 - DNA, 25 bp, Homo sapiens
ttcaagtgcggcgtgtgcgccaagc

SEQ ID NO: 5976 - DNA, 25 bp, Homo sapiens
caggttctgggcgttctccagggcc

SEQ ID NO: 5977 - DNA, 25 bp, Homo sapiens
cttagggtggctggtgctcgtatct

SEQ ID NO: 5978 - DNA, 25 bp, Homo sapiens
aactgtggcaggcagggccttgtcc

SEQ ID NO: 5979 - DNA, 25 bp, Homo sapiens
gatgcctccggccaagaagtctttg

SEQ ID NO: 5980 - DNA, 25 bp, Homo sapiens
taggtgtcggcgtcctgcaggtggc

SEQ ID NO: 5981 - DNA, 25 bp, Homo sapiens
catttcacgggctgcgggtggcttt

SEQ ID NO: 5982 - DNA, 25 bp, Homo sapiens
ggatgctggggctgggtgttccgcc

SEQ ID NO: 5983 - DNA, 25 bp, Homo sapiens
tatgaggctgggctaaataatctgc

SEQ ID NO: 5984 - DNA, 25 bp, Homo sapiens
gacggctgggcttgataacacactc

SEQ ID NO: 5985 - DNA, 25 bp, Homo sapiens
cggtgccgggctcgcggcgtccccg

SEQ ID NO: 5986 - DNA, 25 bp, Homo sapiens
agggctgtgggctctgcagcctcca

SEQ ID NO: 5987 - DNA, 25 bp, Homo sapiens
cctgctgttgggctgcgtttcctag

SEQ ID NO: 5988 - DNA, 25 bp, Homo sapiens
gctgagcaagggctgagcaaacaaa

SEQ ID NO: 5989 - DNA, 25 bp, Homo sapiens
tttattgggctggtgcaaaagcaat

SEQ ID NO: 5990 - DNA, 25 bp, Homo sapiens
ttgattctgggctggtgcaatttct

SEQ ID NO: 5991 - DNA, 25 bp, Homo sapiens
ttggtggtggcgacaatcccaacaa

SEQ ID NO: 5992 - DNA, 25 bp, Homo sapiens
ctttattcggctgtgtggcagtggc

SEQ ID NO: 5993 - DNA, 25 bp, Homo sapiens
gtttctaggccaatccctcacacag

SEQ ID NO: 5994 - DNA, 25 bp, Homo sapiens
ggcggcagaggccaagtactctagc

SEQ ID NO: 5995 - DNA, 25 bp, Homo sapiens
caaaggtaggcgtgctgtgctgctc

SEQ ID NO: 5996 - DNA, 25 bp, Homo sapiens
aaaaccaggcgcgtgcggcgacgtc

SEQ ID NO: 5997 - DNA, 25 bp, Homo sapiens
cacaagaggaggcttccggagtagc

SEQ ID NO: 5998 - DNA, 25 bp, Homo sapiens
tgtccggaggctccgtgctgctgcc

SEQ ID NO: 5999 - DNA, 25 bp, Homo sapiens
agcaaggtaggctggctctccaaca

SEQ ID NO: 6000 - DNA, 25 bp, Homo sapiens
caccacacacggcagttgaggtggt

SEQ ID NO: 6001 - DNA, 25 bp, Homo sapiens
gcaaaggcaggctaaacttggtcta

SEQ ID NO: 6002 - DNA, 25 bp, Homo sapiens
taaaagaggctgctgttcaatccca

SEQ ID NO: 6003 - DNA, 25 bp, Homo sapiens
caggcgtgctgaggctgaaaatggc

SEQ ID NO: 6004 - DNA, 25 bp, Homo sapiens
tcctggctgggcagagtcctaagca

SEQ ID NO: 6005 - DNA, 25 bp, Homo sapiens
ttgagtagggcacatccaacacata

SEQ ID NO: 6006 - DNA, 25 bp, Homo sapiens
ggcaggagggcaagatctctcaaat

SEQ ID NO: 6007 - DNA, 25 bp, Homo sapiens
ctggtggcgcggcaggaccctccgg

SEQ ID NO: 6008 - DNA, 25 bp, Homo sapiens
catagagtagggcagcagggacctt

SEQ ID NO: 6009 - DNA, 25 bp, Homo sapiens
cacaaaggcggcaggcacaggactg

SEQ ID NO: 6010 - DNA, 25 bp, Homo sapiens
ctgctagcgcgaggcaggcaattac

SEQ ID NO: 6011 - DNA, 25 bp, Homo sapiens
ttgagggaggcaggtatcatgcaat

SEQ ID NO: 6012 - DNA, 25 bp, Homo sapiens
catgagccgtcaggcatcgggcctt

SEQ ID NO: 6013 - DNA, 25 bp, Homo sapiens
cactttagcaggcacacaataaatg

SEQ ID NO: 6014 - DNA, 25 bp, Homo sapiens
tggagtggcaggcagttctcctcta

SEQ ID NO: 6015 - DNA, 25 bp, Homo sapiens
tggtgaagcaggcagtgtctctgct

SEQ ID NO: 6016 - DNA, 25 bp, Homo sapiens
tctgctgtgctgaggcatgaagaca

SEQ ID NO: 6017 - DNA, 25 bp, Homo sapiens
taaaatgtggccaggcacacaggct

SEQ ID NO: 6018 - DNA, 25 bp, Homo sapiens
ggtgctcttggcctgttcccttgac

SEQ ID NO: 6019 - DNA, 25 bp, Homo sapiens
tgtctctgctgtggcctgaacactg

SEQ ID NO: 6020 - DNA, 25 bp, Homo sapiens
ggtgatcctggccatctgtgctgtg

SEQ ID NO: 6021 - DNA, 25 bp, Homo sapiens
caggtcggtggctgctctctccgaa

SEQ ID NO: 6022 - DNA, 25 bp, Homo sapiens
tgggtggtggctgggtagagatgct

SEQ ID NO: 6023 - DNA, 25 bp, Homo sapiens
gagcttttggctgtgctgtaatgaa

SEQ ID NO: 6024 - DNA, 25 bp, Homo sapiens
ttagggtggctggtgctcgtatcta

SEQ ID NO: 6025 - DNA, 25 bp, Homo sapiens
tcacgtggtggctgttggatcttca

SEQ ID NO: 6026 - DNA, 25 bp, Homo sapiens
ccctgacagtggctgtggcgttctt

SEQ ID NO: 6027 - DNA, 25 bp, Homo sapiens
gcagggttggctgtgcttcttctct

SEQ ID NO: 6028 - DNA, 25 bp, Homo sapiens
gatactattggcttggcttcgagca

SEQ ID NO: 6029 - DNA, 25 bp, Homo sapiens
ttttgttggctggtgcacatcgccg

SEQ ID NO: 6030 - DNA, 25 bp, Homo sapiens
cattcccttggctggtgctggtcct

SEQ ID NO: 6031 - DNA, 25 bp, Homo sapiens
tacaccagtggctgagtcgcaagtc

SEQ ID NO: 6032 - DNA, 25 bp, Homo sapiens
cccagtggtggctgttgctagcttc

SEQ ID NO: 6033 - DNA, 25 bp, Homo sapiens
tctgaagcgtggctgtgaattccac

SEQ ID NO: 6034 - DNA, 25 bp, Homo sapiens
ctctggtgctgtggcttaacattca

SEQ ID NO: 6035 - DNA, 25 bp, Homo sapiens
cgccggttggctggtcacagatgta

SEQ ID NO: 6036 - DNA, 25 bp, Homo sapiens
ttacagcgtggctgatgctgctcct

SEQ ID NO: 6037 - DNA, 25 bp, Homo sapiens
tcttcagcgtggctgcgtgcagatg

SEQ ID NO: 6038 - DNA, 25 bp, Homo sapiens
cattaaagtggctgctgctcattca

SEQ ID NO: 6039 - DNA, 25 bp, Homo sapiens
cttgctgttgctggctatgatgtga

SEQ ID NO: 6040 - DNA, 25 bp, Homo sapiens
ttcaggttggcaagggccacctcgg

SEQ ID NO: 6041 - DNA, 25 bp, Homo sapiens
tgtgaggtgtggcacggcgtctgtg

SEQ ID NO: 6042 - DNA, 25 bp, Homo sapiens
ggctgctggtggcagccgtggtcat

SEQ ID NO: 6043 - DNA, 25 bp, Homo sapiens
aggcgtctgtggcagtgcgtcccct

SEQ ID NO: 6044 - DNA, 25 bp, Homo sapiens
ccgccatggccccaaccacacactg

SEQ ID NO: 6045 - DNA, 25 bp, Homo sapiens
gtgtacacccccacacaaggctaag

SEQ ID NO: 6046 - DNA, 25 bp, Homo sapiens
tttaagccccacacccttggagatg

SEQ ID NO: 6047 - DNA, 25 bp, Homo sapiens
agataggcaccccagccatggagca

SEQ ID NO: 6048 - DNA, 25 bp, Homo sapiens
gaacaaccccacacgaggcagtggt

SEQ ID NO: 6049 - DNA, 25 bp, Homo sapiens
tgggcgtgccccgagctgcggttgt

SEQ ID NO: 6050 - DNA, 25 bp, Homo sapiens
caccagtgccccgtgtgtgggaagc

SEQ ID NO: 6051 - DNA, 25 bp, Homo sapiens
gaggcactgccccactggtgtgctg

SEQ ID NO: 6052 - DNA, 25 bp, Homo sapiens
taagggccctaaggctgtgctgtcc

SEQ ID NO: 6053 - DNA, 25 bp, Homo sapiens
tcttgaccccgaagaggatggtgcg

SEQ ID NO: 6054 - DNA, 25 bp, Homo sapiens
tccaggtcccggagtagtggtgaca

SEQ ID NO: 6055 - DNA, 25 bp, Homo sapiens
tggtgaccccgtggtggcagcgtgg

SEQ ID NO: 6056 - DNA, 25 bp, Homo sapiens
tggacttcccgaaaaagaagctggc

SEQ ID NO: 6057 - DNA, 25 bp, Homo sapiens
gggtggcccgcgtgtgtctgtgtgt

SEQ ID NO: 6058 - DNA, 25 bp, Homo sapiens
gccgggcccgcatttttgctcggaa

SEQ ID NO: 6059 - DNA, 25 bp, Homo sapiens
gcttggtgcccgtgtggtcactgca

SEQ ID NO: 6060 - DNA, 25 bp, Homo sapiens
cagtgaccgcccgatagaaagagga

SEQ ID NO: 6061 - DNA, 25 bp, Homo sapiens
tgggagcccctttatgggctggcca

SEQ ID NO: 6062 - DNA, 25 bp, Homo sapiens
tcacaacagccctgtgtggtcccag

SEQ ID NO: 6063 - DNA, 25 bp, Homo sapiens
ctggaggtgccctgtgtgccacaaa

SEQ ID NO: 6064 - DNA, 25 bp, Homo sapiens
ggaggtgccctgtgtccagcagcac

SEQ ID NO: 6065 - DNA, 25 bp, Homo sapiens
aacgcaaaccccacgctgcgaggag

SEQ ID NO: 6066 - DNA, 25 bp, Homo sapiens
aaggagcaaccccacgcataggtgg

SEQ ID NO: 6067 - DNA, 25 bp, Homo sapiens
gtgagaaaccccaccatcaccttgg

SEQ ID NO: 6068 - DNA, 25 bp, Homo sapiens
tgacttgaacccaaccacagactgg

SEQ ID NO: 6069 - DNA, 25 bp, Homo sapiens
ttctgataacccaccaccatggaca

SEQ ID NO: 6070 - DNA, 25 bp, Homo sapiens
gaaacataccctcagaccaagtgtg

SEQ ID NO: 6071 - DNA, 25 bp, Homo sapiens
tcacaaccacccgataccacgacgt

SEQ ID NO: 6072 - DNA, 25 bp, Homo sapiens
gctccatccacccagagtctgggag

SEQ ID NO: 6073 - DNA, 25 bp, Homo sapiens
aaacaccaccgcactatgattagcc

SEQ ID NO: 6074 - DNA, 25 bp, Homo sapiens
cgtccaccacccctgacaataggag

SEQ ID NO: 6075 - DNA, 25 bp, Homo sapiens
gagccacacacccattataagaaat

SEQ ID NO: 6076 - DNA, 25 bp, Homo sapiens
tcatccaccacccatgaagaggcat

SEQ ID NO: 6077 - DNA, 25 bp, Homo sapiens
gattcacacacccaatgcacagaga

SEQ ID NO: 6078 - DNA, 25 bp, Homo sapiens
aggacacacacccaggccagaggga

SEQ ID NO: 6079 - DNA, 25 bp, Homo sapiens
tgcaccaccaccgagggcttgatgt

SEQ ID NO: 6080 - DNA, 25 bp, Homo sapiens
gaaatatacctcagcacaccagaag

SEQ ID NO: 6081 - DNA, 25 bp, Homo sapiens
cacacacacaacctgagggagggct

SEQ ID NO: 6082 - DNA, 25 bp, Homo sapiens
caaacaccaccttactatgaagctg

SEQ ID NO: 6083 - DNA, 25 bp, Homo sapiens
tccatagccacctgcggaggcggaa

SEQ ID NO: 6084 - DNA, 25 bp, Homo sapiens
atagcactcacacctaggttccaag

SEQ ID NO: 6085 - DNA, 25 bp, Homo sapiens
cacccaccacctgactgggatttgg

SEQ ID NO: 6086 - DNA, 25 bp, Homo sapiens
tgatgtgctcacacctcaggaatga

SEQ ID NO: 6087 - DNA, 25 bp, Homo sapiens
gacacaccacctgaagtgactcggg

SEQ ID NO: 6088 - DNA, 25 bp, Homo sapiens
tctagacgcccacaccgtgagggct

SEQ ID NO: 6089 - DNA, 25 bp, Homo sapiens
gccatggccccaaccacacactggg

SEQ ID NO: 6090 - DNA, 25 bp, Homo sapiens
cagccgcaacacctgcagctgtagg

SEQ ID NO: 6091 - DNA, 25 bp, Homo sapiens
aatgggacccaaccacctcatggtg

SEQ ID NO: 6092 - DNA, 25 bp, Homo sapiens
caaacgacccaccactgtataagtg

SEQ ID NO: 6093 - DNA, 25 bp, Homo sapiens
gacacaacccaccaccatgggagtc

SEQ ID NO: 6094 - DNA, 25 bp, Homo sapiens
aaccgcacccaaacactgctgggta

SEQ ID NO: 6095 - DNA, 25 bp, Homo sapiens
gtgataacccaccaccattggacca

SEQ ID NO: 6096 - DNA, 25 bp, Homo sapiens
cctttacccacacagacgctgaagg

SEQ ID NO: 6097 - DNA, 25 bp, Homo sapiens
gaatgcaacccactcacaaaataaa

SEQ ID NO: 6098 - DNA, 25 bp, Homo sapiens
gtaccacccacacaaggaggatcgg

SEQ ID NO: 6099 - DNA, 25 bp, Homo sapiens
caggtgtacccacacactggagaca

SEQ ID NO: 6100 - DNA, 25 bp, Homo sapiens
aagcctcacccacacaagtcagttg

SEQ ID NO: 6101 - DNA, 25 bp, Homo sapiens
tccctgatgcccacagcacgagaaa

SEQ ID NO: 6102 - DNA, 25 bp, Homo sapiens
tgcgggtcccactgaaatgcgcgca

SEQ ID NO: 6103 - DNA, 25 bp, Homo sapiens
gaaggacccacacaagaattctagc

SEQ ID NO: 6104 - DNA, 25 bp, Homo sapiens
aatcacaccccagaaacagtctcga

SEQ ID NO: 6105 - DNA, 25 bp, Homo sapiens
ccaacacacccagagtgcaatggat

SEQ ID NO: 6106 - DNA, 25 bp, Homo sapiens
tttggacccagccacacaaacagga

SEQ ID NO: 6107 - DNA, 25 bp, Homo sapiens
caggtctgtgcccagaaaggagact

SEQ ID NO: 6108 - DNA, 25 bp, Homo sapiens
gacacagacccatagaagcgagctt

SEQ ID NO: 6109 - DNA, 25 bp, Homo sapiens
gtccacagcccagtatctacagagg

SEQ ID NO: 6110 - DNA, 25 bp, Homo sapiens
cagccatccacccattcagtgaggt

SEQ ID NO: 6111 - DNA, 25 bp, Homo sapiens
tcacactcacccatgcttttacatg

SEQ ID NO: 6112 - DNA, 25 bp, Homo sapiens
ttaggtgaccaccaccccaaggtca

SEQ ID NO: 6113 - DNA, 25 bp, Homo sapiens
gaaacaaccaacgaccagtacaaga

SEQ ID NO: 6114 - DNA, 25 bp, Homo sapiens
gttcaaaccaacagcgacaatagcc

SEQ ID NO: 6115 - DNA, 25 bp, Homo sapiens
gatagcaaaccacactcggcacagg

SEQ ID NO: 6116 - DNA, 25 bp, Homo sapiens
ctgatgctgatgctaccaacgctgc

SEQ ID NO: 6117 - DNA, 25 bp, Homo sapiens
agggaataccacacagactgcccgg

SEQ ID NO: 6118 - DNA, 25 bp, Homo sapiens
ggcgtggaccagcttggcggctgca

SEQ ID NO: 6119 - DNA, 25 bp, Homo sapiens
gtacacagaccacacaatgtgccac

SEQ ID NO: 6120 - DNA, 25 bp, Homo sapiens
ggttcatgaccaccacggacttgcc

SEQ ID NO: 6121 - DNA, 25 bp, Homo sapiens
cccagccaaccagatcaactgaata

SEQ ID NO: 6122 - DNA, 25 bp, Homo sapiens
tgaagccacaccacgctacggtctg

SEQ ID NO: 6123 - DNA, 25 bp, Homo sapiens
caccagtgccaccacgtcagggtcc

SEQ ID NO: 6124 - DNA, 25 bp, Homo sapiens
ccaccaacaccaattgtgcagtgga

SEQ ID NO: 6125 - DNA, 25 bp, Homo sapiens
aaacaccaccactgcaaacggttca

SEQ ID NO: 6126 - DNA, 25 bp, Homo sapiens
agcgaatccaccacgaacaacttct

SEQ ID NO: 6127 - DNA, 25 bp, Homo sapiens
gtctaccaccactttgaaaagatgg

SEQ ID NO: 6128 - DNA, 25 bp, Homo sapiens
ggagcatacaccaccactcctgtgt

SEQ ID NO: 6129 - DNA, 25 bp, Homo sapiens
gatgcttgccaccacccaatgatga

SEQ ID NO: 6130 - DNA, 25 bp, Homo sapiens
tgtccaccaccagaaggaacccatt

SEQ ID NO: 6131 - DNA, 25 bp, Homo sapiens
tacaaacaccacgagacagtttagg

SEQ ID NO: 6132 - DNA, 25 bp, Homo sapiens
gcacagcaacaccaagaatccactt

SEQ ID NO: 6133 - DNA, 25 bp, Homo sapiens
tggcccacaccacaggagaagggcg

SEQ ID NO: 6134 - DNA, 25 bp, Homo sapiens
tattatccaccaacaccagtacgtg

SEQ ID NO: 6135 - DNA, 25 bp, Homo sapiens
catgggcaacaccacactgcttgta

SEQ ID NO: 6136 - DNA, 25 bp, Homo sapiens
atcaccaccaccaatgacgatgcta

SEQ ID NO: 6137 - DNA, 25 bp, Homo sapiens
aatagcagtcaccaccacaatatgc

SEQ ID NO: 6138 - DNA, 25 bp, Homo sapiens
ggaagatcaccaccacagtcaacag

SEQ ID NO: 6139 - DNA, 25 bp, Homo sapiens
tgagttgcacaccaaacacaggctg

SEQ ID NO: 6140 - DNA, 25 bp, Homo sapiens
tgggcaaaccatacactaacttggg

SEQ ID NO: 6141 - DNA, 25 bp, Homo sapiens
gtaaacaccacactgcacttgaacc

SEQ ID NO: 6142 - DNA, 25 bp, Homo sapiens
gcacgaacaccaccgcagacaaggg

SEQ ID NO: 6143 - DNA, 25 bp, Homo sapiens
atggctgcccaccacgcaatagatg

SEQ ID NO: 6144 - DNA, 25 bp, Homo sapiens
taaaacaccaccagagcacaagtga

SEQ ID NO: 6145 - DNA, 25 bp, Homo sapiens
tgtgtagtgcaccacacacgtttgg

SEQ ID NO: 6146 - DNA, 25 bp, Homo sapiens
tgacacaacaccacagatctcagag

SEQ ID NO: 6147 - DNA, 25 bp, Homo sapiens
gcgcaaacaccagcagaatcacagg

SEQ ID NO: 6148 - DNA, 25 bp, Homo sapiens
tgagcgctgacaccacaccatggtt

SEQ ID NO: 6149 - DNA, 25 bp, Homo sapiens
gattcgcacaccacaaccagaaaga

SEQ ID NO: 6150 - DNA, 25 bp, Homo sapiens
tacaacgcaccaaaactcgcgggat

SEQ ID NO: 6151 - DNA, 25 bp, Homo sapiens
gagtgagctgcaccaagttccagag

SEQ ID NO: 6152 - DNA, 25 bp, Homo sapiens
caccagcatcaaccataaaacctag

SEQ ID NO: 6153 - DNA, 25 bp, Homo sapiens
ccggcaccaccagaagtcaggaaaa

SEQ ID NO: 6154 - DNA, 25 bp, Homo sapiens
taccaccaccatggtatggacagtt

SEQ ID NO: 6155 - DNA, 25 bp, Homo sapiens
catccaccagcaccatggagtgtca

SEQ ID NO: 6156 - DNA, 25 bp, Homo sapiens
tctgtagttccggttcccgttgagc

SEQ ID NO: 6157 - DNA, 25 bp, Homo sapiens
tgcacactccaccatgtcatgtaga

SEQ ID NO: 6158 - DNA, 25 bp, Homo sapiens
gcagcccacaccatctgatactgtg

SEQ ID NO: 6159 - DNA, 25 bp, Homo sapiens
tagaacattcccaccaccatgaggt

SEQ ID NO: 6160 - DNA, 25 bp, Homo sapiens
actgagttgtccgtggtggtgtcca

SEQ ID NO: 6161 - DNA, 25 bp, Homo sapiens
gacacacactccgagtaatttggtg

SEQ ID NO: 6162 - DNA, 25 bp, Homo sapiens
cgtggagttccgctttgactgtggc

SEQ ID NO: 6163 - DNA, 25 bp, Homo sapiens
tgcttggtctcccggttccagtgtg

SEQ ID NO: 6164 - DNA, 25 bp, Homo sapiens
gaacctctcccgtgagctgctggga

SEQ ID NO: 6165 - DNA, 25 bp, Homo sapiens
caaaggcttccttaggtgcgcggct

SEQ ID NO: 6166 - DNA, 25 bp, Homo sapiens
tgctgggtgtcctaggttaagatcc

SEQ ID NO: 6167 - DNA, 25 bp, Homo sapiens
tgtgcatgtgtgtccttggccgaat

SEQ ID NO: 6168 - DNA, 25 bp, Homo sapiens
tatctgtggctcctagtggcagcct

SEQ ID NO: 6169 - DNA, 25 bp, Homo sapiens
tgtagttctcctcagcattagcact

SEQ ID NO: 6170 - DNA, 25 bp, Homo sapiens
ggtctgtgctcctcctctaagtggg

SEQ ID NO: 6171 - DNA, 25 bp, Homo sapiens
acgaggcgcatcctcacttctcgga

SEQ ID NO: 6172 - DNA, 25 bp, Homo sapiens
gctgctcataatcctggcccaggta

SEQ ID NO: 6173 - DNA, 25 bp, Homo sapiens
gccattctgatcctccacgctggtg

SEQ ID NO: 6174 - DNA, 25 bp, Homo sapiens
tatcctcttccaaaagtctcttagg

SEQ ID NO: 6175 - DNA, 25 bp, Homo sapiens
tgtctgctttccaatcaccggtgct

SEQ ID NO: 6176 - DNA, 25 bp, Homo sapiens
tcagagtcattccacacacagggtt

SEQ ID NO: 6177 - DNA, 25 bp, Homo sapiens
gccacaggtccacaacgttcatcag

SEQ ID NO: 6178 - DNA, 25 bp, Homo sapiens
gaaaggtccacacacctctcggtta

SEQ ID NO: 6179 - DNA, 25 bp, Homo sapiens
tgacaagagtccacacactgaagaa

SEQ ID NO: 6180 - DNA, 25 bp, Homo sapiens
taaatagtccacacacagcaagagg

SEQ ID NO: 6181 - DNA, 25 bp, Homo sapiens
tgtgcaggcgtccagaaggtgaaaa

SEQ ID NO: 6182 - DNA, 25 bp, Homo sapiens
tgatgtgtgtgtccagtcaactgcc

SEQ ID NO: 6183 - DNA, 25 bp, Homo sapiens
tggacaactccacaaaacacagctt

SEQ ID NO: 6184 - DNA, 25 bp, Homo sapiens
cgaggtggctccaagaatgcctcat

SEQ ID NO: 6185 - DNA, 25 bp, Homo sapiens
agaagagggcccgaacgcacgctcc

SEQ ID NO: 6186 - DNA, 25 bp, Homo sapiens
ggtggggcccgtgcgtcgtggcggc

SEQ ID NO: 6187 - DNA, 25 bp, Homo sapiens
ggcaggtggccccagttatacacac

SEQ ID NO: 6188 - DNA, 25 bp, Homo sapiens
gagaggcggcccaatcttctgagat

SEQ ID NO: 6189 - DNA, 25 bp, Homo sapiens
atgtggctgtggccccatagctgcg

SEQ ID NO: 6190 - DNA, 25 bp, Homo sapiens
ctaaccaggccgtcgctggctggca

SEQ ID NO: 6191 - DNA, 25 bp, Homo sapiens
gagtgtgccgcccagattgttacca

SEQ ID NO: 6192 - DNA, 25 bp, Homo sapiens
aagggcaggccgctccttggagctc

SEQ ID NO: 6193 - DNA, 25 bp, Homo sapiens
tcgtgaacgccgcacacatggttgt

SEQ ID NO: 6194 - DNA, 25 bp, Homo sapiens
ttttgtggccttggttgtccagtcg

SEQ ID NO: 6195 - DNA, 25 bp, Homo sapiens
tcaaccacgcctaaagaggaaagaa

SEQ ID NO: 6196 - DNA, 25 bp, Homo sapiens
gaggagaggcctggcctttgtctca

SEQ ID NO: 6197 - DNA, 25 bp, Homo sapiens
gagtgtgggcctgtttcagtcatca

SEQ ID NO: 6198 - DNA, 25 bp, Homo sapiens
tgtgtgtgtcgcctgctaggtattt

SEQ ID NO: 6199 - DNA, 25 bp, Homo sapiens
gaggttcgccttttgcacgcacggt

SEQ ID NO: 6200 - DNA, 25 bp, Homo sapiens
aagttgtagccgctgctgccctggt

SEQ ID NO: 6201 - DNA, 25 bp, Homo sapiens
ttcaactagccctgtgtggaaaaga

SEQ ID NO: 6202 - DNA, 25 bp, Homo sapiens
gatagacaagcccacacaaggaagc

SEQ ID NO: 6203 - DNA, 25 bp, Homo sapiens
aaaagcacagcccacagcgtggctc

SEQ ID NO: 6204 - DNA, 25 bp, Homo sapiens
ggccacacagcccaaagaggctggt

SEQ ID NO: 6205 - DNA, 25 bp, Homo sapiens
tccagcacaagcctaccaagtgatg

SEQ ID NO: 6206 - DNA, 25 bp, Homo sapiens
aaccagacgccaaagctagaaaggg

SEQ ID NO: 6207 - DNA, 25 bp, Homo sapiens
gtgagctgggccaaggtgaaattct

SEQ ID NO: 6208 - DNA, 25 bp, Homo sapiens
tcttgacacagccacccagggtggt

SEQ ID NO: 6209 - DNA, 25 bp, Homo sapiens
agtggcaaagccacacccagctact

SEQ ID NO: 6210 - DNA, 25 bp, Homo sapiens
taatgaccagccagaccgttgggac

SEQ ID NO: 6211 - DNA, 25 bp, Homo sapiens
tgtccacacagccatagcaatccag

SEQ ID NO: 6212 - DNA, 25 bp, Homo sapiens
caacctgacagccactaaatagtgg

SEQ ID NO: 6213 - DNA, 25 bp, Homo sapiens
tttgaccagccaccaagatttccag

SEQ ID NO: 6214 - DNA, 25 bp, Homo sapiens
gcaaagccagccacatatacacatg

SEQ ID NO: 6215 - DNA, 25 bp, Homo sapiens
tctttcttgccgaggctggcgtcgg

SEQ ID NO: 6216 - DNA, 25 bp, Homo sapiens
gtgtgggtgcccttcccagtgacca

SEQ ID NO: 6217 - DNA, 25 bp, Homo sapiens
tttccattgccgctggagcaggcag

SEQ ID NO: 6218 - DNA, 25 bp, Homo sapiens
agaatgtgctgtgccgtctgtgccc

SEQ ID NO: 6219 - DNA, 25 bp, Homo sapiens
cctgggctgtgccttggaggctcac

SEQ ID NO: 6220 - DNA, 25 bp, Homo sapiens
taggctggtgccatttagaaatgac

SEQ ID NO: 6221 - DNA, 25 bp, Homo sapiens
gcctgtgtgtgcctttcctggcatc

SEQ ID NO: 6222 - DNA, 25 bp, Homo sapiens
catgttgaggctgccgcatgaggcc

SEQ ID NO: 6223 - DNA, 25 bp, Homo sapiens
catggtgtgtgtgccttgtagatcc

SEQ ID NO: 6224 - DNA, 25 bp, Homo sapiens
acacacgaacgaacaaacgaagtca

SEQ ID NO: 6225 - DNA, 25 bp, Homo sapiens
atcctgggctgcctgagctttccag

SEQ ID NO: 6226 - DNA, 25 bp, Homo sapiens
ctgctgtgggatgccctgctccttg

SEQ ID NO: 6227 - DNA, 25 bp, Homo sapiens
gggtatgtgccacaccacccaggag

SEQ ID NO: 6228 - DNA, 25 bp, Homo sapiens
ctgtgtgtgccatgcccagattgaa

SEQ ID NO: 6229 - DNA, 25 bp, Homo sapiens
acacttggtgccagggtcccgagca

SEQ ID NO: 6230 - DNA, 25 bp, Homo sapiens
gaccacttgccagggtgctgagtag

SEQ ID NO: 6231 - DNA, 25 bp, Homo sapiens
ccggcggccggtggcaccacacata

SEQ ID NO: 6232 - DNA, 25 bp, Homo sapiens
gttttccgggtcgtggcagcatcct

SEQ ID NO: 6233 - DNA, 25 bp, Homo sapiens
gcccggccggtggcgcgtcggtctg

SEQ ID NO: 6234 - DNA, 25 bp, Homo sapiens
ttttctccggagctgaggcgcaaag

SEQ ID NO: 6235 - DNA, 25 bp, Homo sapiens
ccccgtgccggtggctgcggttcat

SEQ ID NO: 6236 - DNA, 25 bp, Homo sapiens
tacagggccggagttaagatgagtc

SEQ ID NO: 6237 - DNA, 25 bp, Homo sapiens
catggaatcccgtcctggtgtctgt

SEQ ID NO: 6238 - DNA, 25 bp, Homo sapiens
caagatttccgtacacacacgagtg

SEQ ID NO: 6239 - DNA, 25 bp, Homo sapiens
actctcagtccgtggctggagtaga

SEQ ID NO: 6240 - DNA, 25 bp, Homo sapiens
agtcgcggccgttggtgtcctcagc

SEQ ID NO: 6241 - DNA, 25 bp, Homo sapiens
tgatccgcccgtgtgatagcaacag

SEQ ID NO: 6242 - DNA, 25 bp, Homo sapiens
aatgaggtgccgtgcccatgtgttc

SEQ ID NO: 6243 - DNA, 25 bp, Homo sapiens
cagaaaaccgtgtgagcccgtttgg

SEQ ID NO: 6244 - DNA, 25 bp, Homo sapiens
tctctgtggccgtgtgtgttgcatg

SEQ ID NO: 6245 - DNA, 25 bp, Homo sapiens
cagcctgcgtccgtgtctgcatctg

SEQ ID NO: 6246 - DNA, 25 bp, Homo sapiens
tcagtgagaccgtgcgtgaaagctg

SEQ ID NO: 6247 - DNA, 25 bp, Homo sapiens
aggagcctgccgtgttgtcacagcg

SEQ ID NO: 6248 - DNA, 25 bp, Homo sapiens
accacacatacggaccaatcgccgt

SEQ ID NO: 6249 - DNA, 25 bp, Homo sapiens
gatttggccgtgtgaggctcagcct

SEQ ID NO: 6250 - DNA, 25 bp, Homo sapiens
gctgtggctgccgtgcgtgtctatt

SEQ ID NO: 6251 - DNA, 25 bp, Homo sapiens
ctgatgctgtctgccgtgcgaggtc

SEQ ID NO: 6252 - DNA, 25 bp, Homo sapiens
gcacccacacggctttggattttgt

SEQ ID NO: 6253 - DNA, 25 bp, Homo sapiens
ctgcagcggatacggacggctagtg

SEQ ID NO: 6254 - DNA, 25 bp, Homo sapiens
gcggccgacggtggtgtactgagcg

SEQ ID NO: 6255 - DNA, 25 bp, Homo sapiens
gaggaggacggacaccctgagctcc

SEQ ID NO: 6256 - DNA, 25 bp, Homo sapiens
gataatctcacggacacacagtaag

SEQ ID NO: 6257 - DNA, 25 bp, Homo sapiens
acacacaccacggagaagatttgga

SEQ ID NO: 6258 - DNA, 25 bp, Homo sapiens
accacacagacggtcagagaggtca

SEQ ID NO: 6259 - DNA, 25 bp, Homo sapiens
ctcaatgagctgacggaggagcaca

SEQ ID NO: 6260 - DNA, 25 bp, Homo sapiens
acagcacacagcacggtgagtcgca

SEQ ID NO: 6261 - DNA, 25 bp, Homo sapiens
agcacgcagagcacggcgatctgcg

SEQ ID NO: 6262 - DNA, 25 bp, Homo sapiens
tgagcacgcgacgtcacaaattacc

SEQ ID NO: 6263 - DNA, 25 bp, Homo sapiens
ttgccgcacacgtcgcacgtggtct

SEQ ID NO: 6264 - DNA, 25 bp, Homo sapiens
tctaggaacgctggaggaccttggc

SEQ ID NO: 6265 - DNA, 25 bp, Homo sapiens
cggcggcgacgtgcagtgcatcacc

SEQ ID NO: 6266 - DNA, 25 bp, Homo sapiens
gaccacgcacgtatctcttgagaaa

SEQ ID NO: 6267 - DNA, 25 bp, Homo sapiens
ggatcacacacgtcactgtctttcg

SEQ ID NO: 6268 - DNA, 25 bp, Homo sapiens
cacacatgctacacgtgttcctttt

SEQ ID NO: 6269 - DNA, 25 bp, Homo sapiens
agccaccaccgaaagttctgagcag

SEQ ID NO: 6270 - DNA, 25 bp, Homo sapiens
gaacacaccgaaagataggcctgac

SEQ ID NO: 6271 - DNA, 25 bp, Homo sapiens
gtcttcccgagtgcggcggtgcaac

SEQ ID NO: 6272 - DNA, 25 bp, Homo sapiens
gcaccacgcacgatggctgtttctt

SEQ ID NO: 6273 - DNA, 25 bp, Homo sapiens
gaggttccgagtgctctgcggactc

SEQ ID NO: 6274 - DNA, 25 bp, Homo sapiens
ggtgatgcccgatttcatgcccagg

SEQ ID NO: 6275 - DNA, 25 bp, Homo sapiens
cgggtagcacgaacaccaccgcaga

SEQ ID NO: 6276 - DNA, 25 bp, Homo sapiens
ttagatgaacgcacgctgacacgta

SEQ ID NO: 6277 - DNA, 25 bp, Homo sapiens
tgatggtgatgacgaaggccccagc

SEQ ID NO: 6278 - DNA, 25 bp, Homo sapiens
gcaagcaccacgaacaagctgacat

SEQ ID NO: 6279 - DNA, 25 bp, Homo sapiens
tatgactcacacgacaccagtagtc

SEQ ID NO: 6280 - DNA, 25 bp, Homo sapiens
gccattttcgggactggtggtgtat

SEQ ID NO: 6281 - DNA, 25 bp, Homo sapiens
tgaacacacacgagctccttggtgg

SEQ ID NO: 6282 - DNA, 25 bp, Homo sapiens
gaagatgtgcacgatcagctcgctg

SEQ ID NO: 6283 - DNA, 25 bp, Homo sapiens
cggacggtcggagaaggcagtaggt

SEQ ID NO: 6284 - DNA, 25 bp, Homo sapiens
acgcgcggtcgggcggccgcggccg

SEQ ID NO: 6285 - DNA, 25 bp, Homo sapiens
ccggcggtcggtcggcacgtgcccg

SEQ ID NO: 6286 - DNA, 25 bp, Homo sapiens
gcgcggcgtcggctcgagaggcggc

SEQ ID NO: 6287 - DNA, 25 bp, Homo sapiens
gcgtggcgtcggcgcgcggctccgg

SEQ ID NO: 6288 - DNA, 25 bp, Homo sapiens
gggcgcgtcggcggtaactcctgaa

SEQ ID NO: 6289 - DNA, 25 bp, Homo sapiens
atcacacacagtcgtctaagacacg

SEQ ID NO: 6290 - DNA, 25 bp, Homo sapiens
gcattgctttcgtgtaaattatgta

SEQ ID NO: 6291 - DNA, 25 bp, Homo sapiens
tggctggtgctcgtatctacaaaaa

SEQ ID NO: 6292 - DNA, 25 bp, Homo sapiens
ccagctgtgctgtcgtactcataca

SEQ ID NO: 6293 - DNA, 25 bp, Homo sapiens
tgaagaagtcgtgcggtgctccaca

SEQ ID NO: 6294 - DNA, 25 bp, Homo sapiens
gagggcgtcgtgcttgtgcttcagc

SEQ ID NO: 6295 - DNA, 25 bp, Homo sapiens
gatggatggatcgtacaccttgcct

SEQ ID NO: 6296 - DNA, 25 bp, Homo sapiens
tctaggcatctcgtgtgagcggact

SEQ ID NO: 6297 - DNA, 25 bp, Homo sapiens
cggcaggtgctcgtcctcagagaag

SEQ ID NO: 6298 - DNA, 25 bp, Homo sapiens
aggatgcgctgctcgtcggcctgat

SEQ ID NO: 6299 - DNA, 25 bp, Homo sapiens
cagcgtgcgtatcggaacggctgcg

SEQ ID NO: 6300 - DNA, 25 bp, Homo sapiens
ccagcgctgagtcgaggttgacagg

SEQ ID NO: 6301 - DNA, 25 bp, Homo sapiens
gatgggattcgaacacgcaagcaca

SEQ ID NO: 6302 - DNA, 25 bp, Homo sapiens
ggcggcggcgcctttccaatatggc

SEQ ID NO: 6303 - DNA, 25 bp, Homo sapiens
tctgtattctcgagccatctgctgt

SEQ ID NO: 6304 - DNA, 25 bp, Homo sapiens
cgccccacacgccggccttttctgc

SEQ ID NO: 6305 - DNA, 25 bp, Homo sapiens
gctggcttctcgagaaatattcggc

SEQ ID NO: 6306 - DNA, 25 bp, Homo sapiens
gaagccccgccacaatgtcatgtga

SEQ ID NO: 6307 - DNA, 25 bp, Homo sapiens
gcgtcacaacgcacgtactccgagt

SEQ ID NO: 6308 - DNA, 25 bp, Homo sapiens
tttgaaacgccacacagccgaggcg

SEQ ID NO: 6309 - DNA, 25 bp, Homo sapiens
cgttcaatccgctgggctgctgtgg

SEQ ID NO: 6310 - DNA, 25 bp, Homo sapiens
aagtggtccgctgtggcttctctcc

SEQ ID NO: 6311 - DNA, 25 bp, Homo sapiens
tcggtcaccgctgtggctgcggtca

SEQ ID NO: 6312 - DNA, 25 bp, Homo sapiens
agcttcgccacgcacacggctaggg

SEQ ID NO: 6313 - DNA, 25 bp, Homo sapiens
ccctgtacacgccaccaaaatgatg

SEQ ID NO: 6314 - DNA, 25 bp, Homo sapiens
ggacaccacgcgacgccgtcgggac

SEQ ID NO: 6315 - DNA, 25 bp, Homo sapiens
aggctgctgtgacgcgcaactctag

SEQ ID NO: 6316 - DNA, 25 bp, Homo sapiens
caagcacattgacgctcctgactat

SEQ ID NO: 6317 - DNA, 25 bp, Homo sapiens
tgcaggtcccgcagtgcctgttctc

SEQ ID NO: 6318 - DNA, 25 bp, Homo sapiens
gagggcaccgcacaccatgcagggt

SEQ ID NO: 6319 - DNA, 25 bp, Homo sapiens
gacagaacacgcacatttctctgcg

SEQ ID NO: 6320 - DNA, 25 bp, Homo sapiens
tggacaagacgcacggcacagacat

SEQ ID NO: 6321 - DNA, 25 bp, Homo sapiens
gccagcaccacgcacgatggctgtt

SEQ ID NO: 6322 - DNA, 25 bp, Homo sapiens
ggcgccgcacgcatggactgtgttc

SEQ ID NO: 6323 - DNA, 25 bp, Homo sapiens
taggtgatgacgcagctcttgggcc

SEQ ID NO: 6324 - DNA, 25 bp, Homo sapiens
gctgtccacacgcagatgtacccga

SEQ ID NO: 6325 - DNA, 25 bp, Homo sapiens
gagcacctacgcaccagacatttta

SEQ ID NO: 6326 - DNA, 25 bp, Homo sapiens
gctgattccacgcatggcacgaaaa

SEQ ID NO: 6327 - DNA, 25 bp, Homo sapiens
agcgactccacgcactcaaggtagt

SEQ ID NO: 6328 - DNA, 25 bp, Homo sapiens
ggaacacacgcacagtttctgcctg

SEQ ID NO: 6329 - DNA, 25 bp, Homo sapiens
gggagccacgcacacaatgcgcgtg

SEQ ID NO: 6330 - DNA, 25 bp, Homo sapiens
ccaaggcgacgcacggcacgtaaat

SEQ ID NO: 6331 - DNA, 25 bp, Homo sapiens
tggcgcgcagcacgcattcgatgat

SEQ ID NO: 6332 - DNA, 25 bp, Homo sapiens
gaaaacacgcaggacaacactgatg

SEQ ID NO: 6333 - DNA, 25 bp, Homo sapiens
tacatgctcacacgcataggctgtg

SEQ ID NO: 6334 - DNA, 25 bp, Homo sapiens
ttgaagccacgcactcctgaagaac

SEQ ID NO: 6335 - DNA, 25 bp, Homo sapiens
cgaagatgatgcacgcacaggaggt

SEQ ID NO: 6336 - DNA, 25 bp, Homo sapiens
acatctgacacacgcatgtgaacgc

SEQ ID NO: 6337 - DNA, 25 bp, Homo sapiens
ataacacactcgcatcttccatggc

SEQ ID NO: 6338 - DNA, 25 bp, Homo sapiens
tctcaaaatcgcatcacacgcagca

SEQ ID NO: 6339 - DNA, 25 bp, Homo sapiens
gcgtgcaggtcgcatcgatgtcggt

SEQ ID NO: 6340 - DNA, 25 bp, Homo sapiens
tccttggtcgcacacaccttgacag

SEQ ID NO: 6341 - DNA, 25 bp, Homo sapiens
gtgcagcgtcgcgggtaacccccag

SEQ ID NO: 6342 - DNA, 25 bp, Homo sapiens
gcggacggcggcccggcggtcgggc

SEQ ID NO: 6343 - DNA, 25 bp, Homo sapiens
tgcgggcggcgccagaaactgcaaa

SEQ ID NO: 6344 - DNA, 25 bp, Homo sapiens
agcacagccactcgcagcttgaggg

SEQ ID NO: 6345 - DNA, 25 bp, Homo sapiens
tttagggcggcgattgaattgcacc

SEQ ID NO: 6346 - DNA, 25 bp, Homo sapiens
ttcagtaggcggcaaaggcggccga

SEQ ID NO: 6347 - DNA, 25 bp, Homo sapiens
gcgggcgcgcggcggccgacgcggg

SEQ ID NO: 6348 - DNA, 25 bp, Homo sapiens
cctccgcggcgggcggtcgagcggg

SEQ ID NO: 6349 - DNA, 25 bp, Homo sapiens
tcaaagcggcggctgaggtcaaaga

SEQ ID NO: 6350 - DNA, 25 bp, Homo sapiens
aggcgcgcggcgtggtatccccaaa

SEQ ID NO: 6351 - DNA, 25 bp, Homo sapiens
aaggcggcgcggaatcccttcttca

SEQ ID NO: 6352 - DNA, 25 bp, Homo sapiens
gggcgcggcgggcagtgcggaagcc

SEQ ID NO: 6353 - DNA, 25 bp, Homo sapiens
gcggccggcggtcggccccctgagc

SEQ ID NO: 6354 - DNA, 25 bp, Homo sapiens
tgcaaagcggcggtgggttgtccca

SEQ ID NO: 6355 - DNA, 25 bp, Homo sapiens
tcggtgcggcggtaccattttcttc

SEQ ID NO: 6356 - DNA, 25 bp, Homo sapiens
acaaggcggcgtcaggcgttcctca

SEQ ID NO: 6357 - DNA, 25 bp, Homo sapiens
cacgacctggcggtggtcttccact

SEQ ID NO: 6358 - DNA, 25 bp, Homo sapiens
tgtggccggcggcagaattcatcct

SEQ ID NO: 6359 - DNA, 25 bp, Homo sapiens
gtcccggcggcagtcgtgctacctg

SEQ ID NO: 6360 - DNA, 25 bp, Homo sapiens
aatcggcggcggtatttctctgacg

SEQ ID NO: 6361 - DNA, 25 bp, Homo sapiens
caaggtaggcggcatagagctgctc

SEQ ID NO: 6362 - DNA, 25 bp, Homo sapiens
ggactcggcggcgtcctgttgccaa

SEQ ID NO: 6363 - DNA, 25 bp, Homo sapiens
ggagggcgcggtgtggtcattttaa

SEQ ID NO: 6364 - DNA, 25 bp, Homo sapiens
gctggttggcgttggtgtctttaaa

SEQ ID NO: 6365 - DNA, 25 bp, Homo sapiens
aagaaaggcggctgcttgaaggaca

SEQ ID NO: 6366 - DNA, 25 bp, Homo sapiens
taggagatggcgtatgtaaatcccc

SEQ ID NO: 6367 - DNA, 25 bp, Homo sapiens
tcggcggcgcggtcgcggccggggg

SEQ ID NO: 6368 - DNA, 25 bp, Homo sapiens
gagcaggtggcggtgccatctccac

SEQ ID NO: 6369 - DNA, 25 bp, Homo sapiens
tccaggcggcgtttcaggttctcag

SEQ ID NO: 6370 - DNA, 25 bp, Homo sapiens
ccagcaggcggcgtctgagccagta

SEQ ID NO: 6371 - DNA, 25 bp, Homo sapiens
gggcggcgcgttacgagggacacag

SEQ ID NO: 6372 - DNA, 25 bp, Homo sapiens
acatagtcggcgtgcgtgtggaacc

SEQ ID NO: 6373 - DNA, 25 bp, Homo sapiens
agtacagggcgtggctgctgttggt

SEQ ID NO: 6374 - DNA, 25 bp, Homo sapiens
ctttcttagcggctggctgctcggc

SEQ ID NO: 6375 - DNA, 25 bp, Homo sapiens
tctgtcatgcggcgtcgaagcggac

SEQ ID NO: 6376 - DNA, 25 bp, Homo sapiens
agcgggcggcgtacggcctggggcc

SEQ ID NO: 6377 - DNA, 25 bp, Homo sapiens
cgcgggcggcgtcggccggccgggc

SEQ ID NO: 6378 - DNA, 25 bp, Homo sapiens
ccagtggtggcgtcgaggaatatta

SEQ ID NO: 6379 - DNA, 25 bp, Homo sapiens
acagtgtgaggcgtgtgcaccactg

SEQ ID NO: 6380 - DNA, 25 bp, Homo sapiens
aaagtgtgagcgtgtgtagccctcg

SEQ ID NO: 6381 - DNA, 25 bp, Homo sapiens
tgtgtctcggcgtggtttcctgctc

SEQ ID NO: 6382 - DNA, 25 bp, Homo sapiens
cacagtgtgaggcgtgtgcaccact

SEQ ID NO: 6383 - DNA, 25 bp, Homo sapiens
gatagcagggcgtgaggaacttcac

SEQ ID NO: 6384 - DNA, 25 bp, Homo sapiens
gccgcacacgcgtatactgtataca

SEQ ID NO: 6385 - DNA, 25 bp, Homo sapiens
gcagtcggagcggttgtggtccccg

SEQ ID NO: 6386 - DNA, 25 bp, Homo sapiens
cgcaggcggcgcgtgggcgcggcgc

SEQ ID NO: 6387 - DNA, 25 bp, Homo sapiens
ctgggcgccgcgtggcggcggcgcg

SEQ ID NO: 6388 - DNA, 25 bp, Homo sapiens
gagaggcagagcgtgttcaactcag

SEQ ID NO: 6389 - DNA, 25 bp, Homo sapiens
tgtgggccgcgtgtagtaaaatctg

SEQ ID NO: 6390 - DNA, 25 bp, Homo sapiens
tagcaggcgagcgtggctactccta

SEQ ID NO: 6391 - DNA, 25 bp, Homo sapiens
gacacgcacgcgttcttcttggatg

SEQ ID NO: 6392 - DNA, 25 bp, Homo sapiens
cgcgccggagcgtgtgtgtgtgtac

SEQ ID NO: 6393 - DNA, 25 bp, Homo sapiens
gaaagtgagcgtgtgcgctgcagga

SEQ ID NO: 6394 - DNA, 25 bp, Homo sapiens
ttggccgagcgtgggtgtctcccct

SEQ ID NO: 6395 - DNA, 25 bp, Homo sapiens
cggcggtcgcgacgggcgtcggccg

SEQ ID NO: 6396 - DNA, 25 bp, Homo sapiens
gatgaggtgcgcgacgacgttctca

SEQ ID NO: 6397 - DNA, 25 bp, Homo sapiens
gccggcggcgaggacttctttgtct

SEQ ID NO: 6398 - DNA, 25 bp, Homo sapiens
gtgtgtgcatgagcgtggacccgga

SEQ ID NO: 6399 - DNA, 25 bp, Homo sapiens
ctggtgacggcgatgaacggtacat

SEQ ID NO: 6400 - DNA, 25 bp, Homo sapiens
tcttgatgcggcgagtggctgcctt

SEQ ID NO: 6401 - DNA, 25 bp, Homo sapiens
ggtaaagcgatccacacacctgggt

SEQ ID NO: 6402 - DNA, 25 bp, Homo sapiens
ttatatatagcgaccacaaccgccc

SEQ ID NO: 6403 - DNA, 25 bp, Homo sapiens
gtacaattgcgtggtatgtgcctcc

SEQ ID NO: 6404 - DNA, 25 bp, Homo sapiens
gtgtgtgtgtgcgtcctcctctctc

SEQ ID NO: 6405 - DNA, 25 bp, Homo sapiens
tctagggctgcggactataatccca

SEQ ID NO: 6406 - DNA, 25 bp, Homo sapiens
tagtcggtgcgtggtgacctgtacc

SEQ ID NO: 6407 - DNA, 25 bp, Homo sapiens
agatgtaagtgcgtgtgtgagattt

SEQ ID NO: 6408 - DNA, 25 bp, Homo sapiens
aaccgtatgcgtgtgcttctgtgcg

SEQ ID NO: 6409 - DNA, 25 bp, Homo sapiens
ctgcggcgcgtgcggtcccggcggg

SEQ ID NO: 6410 - DNA, 25 bp, Homo sapiens
cctcagatgctgtgcgttggccgaa

SEQ ID NO: 6411 - DNA, 25 bp, Homo sapiens
gacaagtgtgcggtgtgccctttga

SEQ ID NO: 6412 - DNA, 25 bp, Homo sapiens
taataagtgcgtgtgtgaagattct

SEQ ID NO: 6413 - DNA, 25 bp, Homo sapiens
cacccctgtgcgtggatgctcaagt

SEQ ID NO: 6414 - DNA, 25 bp, Homo sapiens
tccaacgtgcgtggctggcactggc

SEQ ID NO: 6415 - DNA, 25 bp, Homo sapiens
tccagggctgcgtccggctgctgca

SEQ ID NO: 6416 - DNA, 25 bp, Homo sapiens
catcgctgacgtgcgtgtgatgcag

SEQ ID NO: 6417 - DNA, 25 bp, Homo sapiens
tccaagagtgcgtgtggtccatgag

SEQ ID NO: 6418 - DNA, 25 bp, Homo sapiens
cacgtgtgcatgtgcgtctgtaagc

SEQ ID NO: 6419 - DNA, 25 bp, Homo sapiens
tagttggtgcgcgtgccctggtccc

SEQ ID NO: 6420 - DNA, 25 bp, Homo sapiens
gtgctggtggcgcggcaggaccctc

SEQ ID NO: 6421 - DNA, 25 bp, Homo sapiens
gactgggatgcgtcccttagactgg

SEQ ID NO: 6422 - DNA, 25 bp, Homo sapiens
ccaccgacttggctggatgacggct

SEQ ID NO: 6423 - DNA, 25 bp, Homo sapiens
ggtgtctggcgctcctgacatcatg

SEQ ID NO: 6424 - DNA, 25 bp, Homo sapiens
aggggcggcgcgatgcagaggcggc

SEQ ID NO: 6425 - DNA, 25 bp, Homo sapiens
cagcggcgggcgcgccaccgggggc

SEQ ID NO: 6426 - DNA, 25 bp, Homo sapiens
gccggcggcgcggtcgccccggcgc

SEQ ID NO: 6427 - DNA, 25 bp, Homo sapiens
tcgcccacgcgcactatgtcgatgt

SEQ ID NO: 6428 - DNA, 25 bp, Homo sapiens
tggagggcagcgcaggctcattgtt

SEQ ID NO: 6429 - DNA, 25 bp, Homo sapiens
acgcggcggcgcatttgtatccgtg

SEQ ID NO: 6430 - DNA, 25 bp, Homo sapiens
gtgcggttgcgcggtcgggcgcgcc

SEQ ID NO: 6431 - DNA, 25 bp, Homo sapiens
gcgtgtctggcgctgcgtttgcact

SEQ ID NO: 6432 - DNA, 25 bp, Homo sapiens
aactgcgtggcgctgctgatggaca

SEQ ID NO: 6433 - DNA, 25 bp, Homo sapiens
aggatgtcggcgcacagctggcttc

SEQ ID NO: 6434 - DNA, 25 bp, Homo sapiens
tgtgcaagtcatttacccccagcta

SEQ ID NO: 6435 - DNA, 25 bp, Homo sapiens
tctgtgtgtgcatgcgccttgggac

SEQ ID NO: 6436 - DNA, 25 bp, Homo sapiens
cctgggttgcgcgtgcgtgacttcc

SEQ ID NO: 6437 - DNA, 25 bp, Homo sapiens
tcaacgcttttacactcacacacag

SEQ ID NO: 6438 - DNA, 25 bp, Homo sapiens
ctttgtgttttccatcagggcctca

SEQ ID NO: 6439 - DNA, 25 bp, Homo sapiens
tagatggagtttaccacccgctttg

SEQ ID NO: 6440 - DNA, 25 bp, Homo sapiens
tgtaggatgtttacacacactacag

SEQ ID NO: 6441 - DNA, 25 bp, Homo sapiens
cattttggttctcagggtttgttat

SEQ ID NO: 6442 - DNA, 25 bp, Homo sapiens
cttctcaggtttcgcggctggtgca

SEQ ID NO: 6443 - DNA, 25 bp, Homo sapiens
agcacgcactgtttcgggttcggga

SEQ ID NO: 6444 - DNA, 25 bp, Homo sapiens
tctaggcgtttcacacgcagcagcg

SEQ ID NO: 6445 - DNA, 25 bp, Homo sapiens
tgtgtggttttgtctgtgtgtgcat

SEQ ID NO: 6446 - DNA, 25 bp, Homo sapiens
ccacacacacttttgtaattgaaat

SEQ ID NO: 6447 - DNA, 25 bp, Homo sapiens
gcctttctttctggagtcggcagac

SEQ ID NO: 6448 - DNA, 25 bp, Homo sapiens
cagaggcggctttattagaactaga

SEQ ID NO: 6449 - DNA, 25 bp, Homo sapiens
gaggtgagctttcacttgctgtcca

SEQ ID NO: 6450 - DNA, 25 bp, Homo sapiens
aagtggcctttgttgtgatttctcc

SEQ ID NO: 6451 - DNA, 25 bp, Homo sapiens
tggctgggctttgaggatcaatcac

SEQ ID NO: 6452 - DNA, 25 bp, Homo sapiens
gactctcctttgatggtggtgatag

SEQ ID NO: 6453 - DNA, 25 bp, Homo sapiens
gctgggctgctttcatcacgcgtaa

SEQ ID NO: 6454 - DNA, 25 bp, Homo sapiens
taaaactttgtgctgtggctgaagg

SEQ ID NO: 6455 - DNA, 25 bp, Homo sapiens
caatggctcctttgctgcgtgtgga

SEQ ID NO: 6456 - DNA, 25 bp, Homo sapiens
ggatgaaatttctaatcacacacac

SEQ ID NO: 6457 - DNA, 25 bp, Homo sapiens
ggacagtatttatcacacacaggac

SEQ ID NO: 6458 - DNA, 25 bp, Homo sapiens
gcaacacacatttcctagagggcaa

SEQ ID NO: 6459 - DNA, 25 bp, Homo sapiens
gaaacatcatttaggtgcccagcaa

SEQ ID NO: 6460 - DNA, 25 bp, Homo sapiens
aattgcttttaatgcacacacaaac

SEQ ID NO: 6461 - DNA, 25 bp, Homo sapiens
accctatttaacacaacacccatta

SEQ ID NO: 6462 - DNA, 25 bp, Homo sapiens
taggatgtttacacacactacagca

SEQ ID NO: 6463 - DNA, 25 bp, Homo sapiens
gtcgtgtttagacacacatcccaca

SEQ ID NO: 6464 - DNA, 25 bp, Homo sapiens
acacacaccttacacacacgtatta

SEQ ID NO: 6465 - DNA, 25 bp, Homo sapiens
tcttcttgcttacttatacccagcc

SEQ ID NO: 6466 - DNA, 25 bp, Homo sapiens
cccttgctgcttacggcgctggcag

SEQ ID NO: 6467 - DNA, 25 bp, Homo sapiens
agaactggattaatcacattccttg

SEQ ID NO: 6468 - DNA, 25 bp, Homo sapiens
ccacacacatattactcatagttta

SEQ ID NO: 6469 - DNA, 25 bp, Homo sapiens
caggcagggcattaatttcatcttc

SEQ ID NO: 6470 - DNA, 25 bp, Homo sapiens
caccaccacattagcttagatatgg

SEQ ID NO: 6471 - DNA, 25 bp, Homo sapiens
taaagagttcctccctagtcctgga

SEQ ID NO: 6472 - DNA, 25 bp, Homo sapiens
cagggctctttcgttgttggactac

SEQ ID NO: 6473 - DNA, 25 bp, Homo sapiens
tgtggctgcgcttccgatgccggtt

SEQ ID NO: 6474 - DNA, 25 bp, Homo sapiens
tgggacgcttccacttgatgccata

SEQ ID NO: 6475 - DNA, 25 bp, Homo sapiens
cgctgatgatgctgcttcttaaacc

SEQ ID NO: 6476 - DNA, 25 bp, Homo sapiens
ggctgatggcattccagtactgggt

SEQ ID NO: 6477 - DNA, 25 bp, Homo sapiens
tgttgctgctttcactggccccgta

SEQ ID NO: 6478 - DNA, 25 bp, Homo sapiens
agccgcactttcagcgcacgcagga

SEQ ID NO: 6479 - DNA, 25 bp, Homo sapiens
ttttggttcagcgtgtgtgtgtgta

SEQ ID NO: 6480 - DNA, 25 bp, Homo sapiens
caccttctttcatgtgtgcgtgtgg

SEQ ID NO: 6481 - DNA, 25 bp, Homo sapiens
tgagtagtttcatccacacacagac

SEQ ID NO: 6482 - DNA, 25 bp, Homo sapiens
cagactaaattcacacgcaccaggg

SEQ ID NO: 6483 - DNA, 25 bp, Homo sapiens
tggtttgattcacgcacacatttat

SEQ ID NO: 6484 - DNA, 25 bp, Homo sapiens
tatgcgtgcggttaccacggcaaca

SEQ ID NO: 6485 - DNA, 25 bp, Homo sapiens
tgttgagtgtgttgagtgtggtgtc

SEQ ID NO: 6486 - DNA, 25 bp, Homo sapiens
ccttaatggttggttggttctacta

SEQ ID NO: 6487 - DNA, 25 bp, Homo sapiens
cacgcggcggttgtggatctcatta

SEQ ID NO: 6488 - DNA, 25 bp, Homo sapiens
tggtgtcggttgctccagtaccaac

SEQ ID NO: 6489 - DNA, 25 bp, Homo sapiens
aggtctctggtgtacggtggcacac

SEQ ID NO: 6490 - DNA, 25 bp, Homo sapiens
caggcagcagggttggctatttaaa

SEQ ID NO: 6491 - DNA, 25 bp, Homo sapiens
gatgtatccgttggccgagttggca

SEQ ID NO: 6492 - DNA, 25 bp, Homo sapiens
tgttaaagttcaccacacacagtgg

SEQ ID NO: 6493 - DNA, 25 bp, Homo sapiens
tctggtctgagttggagtggtcctc

SEQ ID NO: 6494 - DNA, 25 bp, Homo sapiens
ggtatgtatgttgagtgtggtgtgt

SEQ ID NO: 6495 - DNA, 25 bp, Homo sapiens
gctggtgctgagttgcctgctccct

SEQ ID NO: 6496 - DNA, 25 bp, Homo sapiens
caaataaagttgctgctgtagcaag

SEQ ID NO: 6497 - DNA, 25 bp, Homo sapiens
catgcgatgtgtagttgacagccac

SEQ ID NO: 6498 - DNA, 25 bp, Homo sapiens
tctcacacacagttcgcctctttga

SEQ ID NO: 6499 - DNA, 25 bp, Homo sapiens
gatttgctgcagttgactctgaccc

SEQ ID NO: 6500 - DNA, 25 bp, Homo sapiens
gtgaacacagttcaccaccaccata

SEQ ID NO: 6501 - DNA, 25 bp, Homo sapiens
cacacacacggtaactaggtaagga

SEQ ID NO: 6502 - DNA, 25 bp, Homo sapiens
gatcacacaggtaacacacacgtgg

SEQ ID NO: 6503 - DNA, 25 bp, Homo sapiens
ctgcagtagggtaccacacacagca

SEQ ID NO: 6504 - DNA, 25 bp, Homo sapiens
ttcccggtactggtgcagcaggtca

SEQ ID NO: 6505 - DNA, 25 bp, Homo sapiens
ggcactcggtactgctgcaggagct

SEQ ID NO: 6506 - DNA, 25 bp, Homo sapiens
cacggcgtggtactgcgtatgcagc

SEQ ID NO: 6507 - DNA, 25 bp, Homo sapiens
gaggcagaggtacatgcttgaacct

SEQ ID NO: 6508 - DNA, 25 bp, Homo sapiens
gtgatggtggtagcgtatttcttcc

SEQ ID NO: 6509 - DNA, 25 bp, Homo sapiens
tcgagctgccgtaggaaacattcgt

SEQ ID NO: 6510 - DNA, 25 bp, Homo sapiens
tcctcttggtatggcaggcacttga

SEQ ID NO: 6511 - DNA, 25 bp, Homo sapiens
agagagctgtggtataatattaggc

SEQ ID NO: 6512 - DNA, 25 bp, Homo sapiens
tgccacacacgtatcacacatatgt

SEQ ID NO: 6513 - DNA, 25 bp, Homo sapiens
ccctgttagtaactgtggctgctgt

SEQ ID NO: 6514 - DNA, 25 bp, Homo sapiens
ggcacgcaagtacacagcctctgta

SEQ ID NO: 6515 - DNA, 25 bp, Homo sapiens
tcttgatgaagtagctcaccagccg

SEQ ID NO: 6516 - DNA, 25 bp, Homo sapiens
cacagtatggcagtaggtagggctc

SEQ ID NO: 6517 - DNA, 25 bp, Homo sapiens
cgacgaacagtaacacacagaaaca

SEQ ID NO: 6518 - DNA, 25 bp, Homo sapiens
tcttgaatcagtacacacacggaat

SEQ ID NO: 6519 - DNA, 25 bp, Homo sapiens
gtgggcagcagtaatctccttctta

SEQ ID NO: 6520 - DNA, 25 bp, Homo sapiens
aagtgtggtgtttttctataactca

SEQ ID NO: 6521 - DNA, 25 bp, Homo sapiens
tgactgtgtgtgtttctgtctgtgt

SEQ ID NO: 6522 - DNA, 25 bp, Homo sapiens
cgcgcgtgtgtgtttctcggctact

SEQ ID NO: 6523 - DNA, 25 bp, Homo sapiens
ctggtgtgcgtgttgagccccgaac

SEQ ID NO: 6524 - DNA, 25 bp, Homo sapiens
gctagcctgctgttgggctgcgttt

SEQ ID NO: 6525 - DNA, 25 bp, Homo sapiens
cagccaccactgttcattttagttc

SEQ ID NO: 6526 - DNA, 25 bp, Homo sapiens
taatgagtctgtttacacacaccaa

SEQ ID NO: 6527 - DNA, 25 bp, Homo sapiens
gatgcgctggctgttgatctccgtg

SEQ ID NO: 6528 - DNA, 25 bp, Homo sapiens
cagagcgggctgttgctggaggaga

SEQ ID NO: 6529 - DNA, 25 bp, Homo sapiens
aacactgctgctgttgaggcggcca

SEQ ID NO: 6530 - DNA, 25 bp, Homo sapiens
tcatgccgctgatgttgctgtgcag

SEQ ID NO: 6531 - DNA, 25 bp, Homo sapiens
gtgtgcatgtgtgtaaagatgagat

SEQ ID NO: 6532 - DNA, 25 bp, Homo sapiens
agtgtgcatgtgtgtaaagatgaga

SEQ ID NO: 6533 - DNA, 25 bp, Homo sapiens
catgtgtgcatgagtgtaccattaa

SEQ ID NO: 6534 - DNA, 25 bp, Homo sapiens
tggtgtttgtagtgtgtgtgtaatg

SEQ ID NO: 6535 - DNA, 25 bp, Homo sapiens
gcagatggctgctgtaaggtacatg

SEQ ID NO: 6536 - DNA, 25 bp, Homo sapiens
ccatgacacactgtacacaccaggg

SEQ ID NO: 6537 - DNA, 25 bp, Homo sapiens
tgctgaggctgctgtaataagggct

SEQ ID NO: 6538 - DNA, 25 bp, Homo sapiens
agacacattctgtacacacagacac

SEQ ID NO: 6539 - DNA, 25 bp, Homo sapiens
catgaattgctgctgtatcccctcg

SEQ ID NO: 6540 - DNA, 25 bp, Homo sapiens
agcttgagggtccacacacacaatt

SEQ ID NO: 6541 - DNA, 25 bp, Homo sapiens
tctccgtggtccgtggtaaagcaca

SEQ ID NO: 6542 - DNA, 25 bp, Homo sapiens
gaagtcaggtcggaggtagtcccaa

SEQ ID NO: 6543 - DNA, 25 bp, Homo sapiens
tggtgatgatggtccctgagaaaaa

SEQ ID NO: 6544 - DNA, 25 bp, Homo sapiens
cagatgctgtgggtcgttcttttac

SEQ ID NO: 6545 - DNA, 25 bp, Homo sapiens
ccgggccgtcgggtggcggcgcggc

SEQ ID NO: 6546 - DNA, 25 bp, Homo sapiens
ccatgtggcggtcgaagacgtgcac

SEQ ID NO: 6547 - DNA, 25 bp, Homo sapiens
tgtgaggtgcgtccaggtgcaccca

SEQ ID NO: 6548 - DNA, 25 bp, Homo sapiens
cgaagctgtggtcttgggagttatt

SEQ ID NO: 6549 - DNA, 25 bp, Homo sapiens
tgtcggcgcgtcggagggtccggca

SEQ ID NO: 6550 - DNA, 25 bp, Homo sapiens
aggcagcagggtctccaaggaggct

SEQ ID NO: 6551 - DNA, 25 bp, Homo sapiens
gaatcaaagtcctgcacacacaatg

SEQ ID NO: 6552 - DNA, 25 bp, Homo sapiens
tcgcacacgcagtcgttgagcagcg

SEQ ID NO: 6553 - DNA, 25 bp, Homo sapiens
cttcttggcagtcttacagcggtac

SEQ ID NO: 6554 - DNA, 25 bp, Homo sapiens
catggatggatgagtctgcatacac

SEQ ID NO: 6555 - DNA, 25 bp, Homo sapiens
ggttcacgtcaccaacaaagcgcgg

SEQ ID NO: 6556 - DNA, 25 bp, Homo sapiens
tctgcacgcacgtcacgatatctgg

SEQ ID NO: 6557 - DNA, 25 bp, Homo sapiens
cactggtgtggtcatcacggctctc

SEQ ID NO: 6558 - DNA, 25 bp, Homo sapiens
tgctggctgcgcgtcaataggagaa

SEQ ID NO: 6559 - DNA, 25 bp, Homo sapiens
ccacaggcggtcatgctgctggagg

SEQ ID NO: 6560 - DNA, 25 bp, Homo sapiens
gcaacaacagtcagtggagcatgga

SEQ ID NO: 6561 - DNA, 25 bp, Homo sapiens
gcatgaacacagtcacccactacta

SEQ ID NO: 6562 - DNA, 25 bp, Homo sapiens
cgtgcgtgttgtcggagttgccata

SEQ ID NO: 6563 - DNA, 25 bp, Homo sapiens
ccacccacagtcactcatgggagga

SEQ ID NO: 6564 - DNA, 25 bp, Homo sapiens
ctgggcggtgtcctcgttatcgata

SEQ ID NO: 6565 - DNA, 25 bp, Homo sapiens
gaacacacagtcatcactcgggctt

SEQ ID NO: 6566 - DNA, 25 bp, Homo sapiens
tccctcgtgtcgttggtggccacag

SEQ ID NO: 6567 - DNA, 25 bp, Homo sapiens
cgtgtgcatgtgtgtccttggccga

SEQ ID NO: 6568 - DNA, 25 bp, Homo sapiens
gaatgtgtgtgtcgtccttctgcag

SEQ ID NO: 6569 - DNA, 25 bp, Homo sapiens
gtcttgctgctgtcctacttagatg

SEQ ID NO: 6570 - DNA, 25 bp, Homo sapiens
cagtgtgtggtgtcgatcctgcata

SEQ ID NO: 6571 - DNA, 25 bp, Homo sapiens
cagaggcaggtgtctaagccggacc

SEQ ID NO: 6572 - DNA, 25 bp, Homo sapiens
agcttgaggtgtctggccctgttga

SEQ ID NO: 6573 - DNA, 25 bp, Homo sapiens
aagtccactgtctggtgcgtgtgca

SEQ ID NO: 6574 - DNA, 25 bp, Homo sapiens
gatgatctctatgtcccaggcagca

SEQ ID NO: 6575 - DNA, 25 bp, Homo sapiens
ttttgtgtgtcagtgtggtgtgtat

SEQ ID NO: 6576 - DNA, 25 bp, Homo sapiens
agatcagccgctgtcacacgcacag

SEQ ID NO: 6577 - DNA, 25 bp, Homo sapiens
ccagggctgctgtcatgtaatctag

SEQ ID NO: 6578 - DNA, 25 bp, Homo sapiens
ccagggctttggacccgatgattaa

SEQ ID NO: 6579 - DNA, 25 bp, Homo sapiens
gctggatgctttggcggcgaaggcg

SEQ ID NO: 6580 - DNA, 25 bp, Homo sapiens
ctggctggatttgggaatacaggct

SEQ ID NO: 6581 - DNA, 25 bp, Homo sapiens
tcagacagctttggtgcacacacac

SEQ ID NO: 6582 - DNA, 25 bp, Homo sapiens
gctctgctgcatttgggcctgcatc

SEQ ID NO: 6583 - DNA, 25 bp, Homo sapiens
tgttaatttggagacaggccaggtg

SEQ ID NO: 6584 - DNA, 25 bp, Homo sapiens
ctgtagccgttggtgtcgttggtct

SEQ ID NO: 6585 - DNA, 25 bp, Homo sapiens
tgtgcaggcgttggagtgccttttc

SEQ ID NO: 6586 - DNA, 25 bp, Homo sapiens
caaagggttggcacacacattgcag

SEQ ID NO: 6587 - DNA, 25 bp, Homo sapiens
tgcagcaggcgttggagatcatcaa

SEQ ID NO: 6588 - DNA, 25 bp, Homo sapiens
tacctgtgttgggtgcaggtgccca

SEQ ID NO: 6589 - DNA, 25 bp, Homo sapiens
ttgtggccttggttgtccagtcggc

SEQ ID NO: 6590 - DNA, 25 bp, Homo sapiens
gtccccttgggtggagtcgtcctca

SEQ ID NO: 6591 - DNA, 25 bp, Homo sapiens
agtgacaacttggcggctgctgcca

SEQ ID NO: 6592 - DNA, 25 bp, Homo sapiens
cacacactggcttggaattgggcat

SEQ ID NO: 6593 - DNA, 25 bp, Homo sapiens
cacacacacagcttggaattggtag

SEQ ID NO: 6594 - DNA, 25 bp, Homo sapiens
tgcggcggttgttctgtgatctact

SEQ ID NO: 6595 - DNA, 25 bp, Homo sapiens
tctcgtgtttgtgtgtatgctcaac

SEQ ID NO: 6596 - DNA, 25 bp, Homo sapiens
acgtgtggcttgtgtgcctcctgcg

SEQ ID NO: 6597 - DNA, 25 bp, Homo sapiens
ccgtgtgacattggcaggcagtgcc

SEQ ID NO: 6598 - DNA, 25 bp, Homo sapiens
tagctttttgccctgtctcctctag

SEQ ID NO: 6599 - DNA, 25 bp, Homo sapiens
gcacacacacttgccaggagggcag

SEQ ID NO: 6600 - DNA, 25 bp, Homo sapiens
ctgcatggcggttgctgcccggctc

SEQ ID NO: 6601 - DNA, 25 bp, Homo sapiens
cacacacacatttgcacaccgggga

SEQ ID NO: 6602 - DNA, 25 bp, Homo sapiens
tcttgcttgattgctgatgggaaac

SEQ ID NO: 6603 - DNA, 25 bp, Homo sapiens
tgaaggatcttgcacgcacacagag

SEQ ID NO: 6604 - DNA, 25 bp, Homo sapiens
ggtggcacattgcacacacatgcgt

SEQ ID NO: 6605 - DNA, 25 bp, Homo sapiens
aatataagattgcacaccaccctgg

SEQ ID NO: 6606 - DNA, 25 bp, Homo sapiens
cgtggttgcgtggtaatccctggca

SEQ ID NO: 6607 - DNA, 25 bp, Homo sapiens
gtctgtgaggtgtggcgcggcgtct

SEQ ID NO: 6608 - DNA, 25 bp, Homo sapiens
aggcgacggtggtagcaccactcaa

SEQ ID NO: 6609 - DNA, 25 bp, Homo sapiens
gataacgagtggaggcaggctacct

SEQ ID NO: 6610 - DNA, 25 bp, Homo sapiens
gttgtgggtggttgtccctcgacaa

SEQ ID NO: 6611 - DNA, 25 bp, Homo sapiens
tcaatgagtggtggcggatacctgc

SEQ ID NO: 6612 - DNA, 25 bp, Homo sapiens
gtgtgtgggtgggtgcgcatttgtg

SEQ ID NO: 6613 - DNA, 25 bp, Homo sapiens
tcgttgctggtggaactgctgccaa

SEQ ID NO: 6614 - DNA, 25 bp, Homo sapiens
ctctcaggaggtggtgtggcagcga

SEQ ID NO: 6615 - DNA, 25 bp, Homo sapiens
cggctgctcggtggccgcaactagt

SEQ ID NO: 6616 - DNA, 25 bp, Homo sapiens
gcgcacgcacgtgggcactattttt

SEQ ID NO: 6617 - DNA, 25 bp, Homo sapiens
cacacgcagcggtggctgtgagtat

SEQ ID NO: 6618 - DNA, 25 bp, Homo sapiens
gcaaggcgtgtgtgtactactatca

SEQ ID NO: 6619 - DNA, 25 bp, Homo sapiens
actcaggtgcgtgtgtactaggccg

SEQ ID NO: 6620 - DNA, 25 bp, Homo sapiens
caatacaggcgtggctgactgagcg

SEQ ID NO: 6621 - DNA, 25 bp, Homo sapiens
tgtgtagtggtgtgtatgtgtagtg

SEQ ID NO: 6622 - DNA, 25 bp, Homo sapiens
caggcctggcgtgtaccttgcttgg

SEQ ID NO: 6623 - DNA, 25 bp, Homo sapiens
tgtgtgcatgagcgtggacccggag

SEQ ID NO: 6624 - DNA, 25 bp, Homo sapiens
tgtgtgagggtgtgaggtgtgagtg

SEQ ID NO: 6625 - DNA, 25 bp, Homo sapiens
cccaagtggtgtcccggagatgcag

SEQ ID NO: 6626 - DNA, 25 bp, Homo sapiens
cctattgggtgtgttgtaaacagag

SEQ ID NO: 6627 - DNA, 25 bp, Homo sapiens
tgtgtgtgggtgtccaatgcctccc

SEQ ID NO: 6628 - DNA, 25 bp, Homo sapiens
gcggcgggtgtcaatctgcaagaca

SEQ ID NO: 6629 - DNA, 25 bp, Homo sapiens
cgtctgtgaggtgtggcgcggcgtc

SEQ ID NO: 6630 - DNA, 25 bp, Homo sapiens
ttcccggtgtgtggcgtgacatgtt

SEQ ID NO: 6631 - DNA, 25 bp, Homo sapiens
catggaggccgtgttaccatggctc

SEQ ID NO: 6632 - DNA, 25 bp, Homo sapiens
gatgagttggtgtgggagtctcccg

SEQ ID NO: 6633 - DNA, 25 bp, Homo sapiens
cacatgtggctggtgtctcctatac

SEQ ID NO: 6634 - DNA, 25 bp, Homo sapiens
cagaatgtgcaggtgtctgcggata

SEQ ID NO: 6635 - DNA, 25 bp, Homo sapiens
aagaataggtgtgtgccctcggaga

SEQ ID NO: 6636 - DNA, 25 bp, Homo sapiens
gctgcggccgtgttgacacaaactg

SEQ ID NO: 6637 - DNA, 25 bp, Homo sapiens
ccggcgggtgtgtggtccacctcca

SEQ ID NO: 6638 - DNA, 25 bp, Homo sapiens
gtctgtgaggtgtggcacggcgtct

SEQ ID NO: 6639 - DNA, 25 bp, Homo sapiens
ttctgtgggtgtgcggtttcagtta

SEQ ID NO: 6640 - DNA, 25 bp, Homo sapiens
tacttgatggtgtgcgcgttgtcgc

SEQ ID NO: 6641 - DNA, 25 bp, Homo sapiens
ccatagtctggtgtgtgtgcagaaa

SEQ ID NO: 6642 - DNA, 25 bp, Homo sapiens
gaagctgaggtgtggctgcattcca

SEQ ID NO: 6643 - DNA, 25 bp, Homo sapiens
atatgcaaggcgtgtgtgtactact

SEQ ID NO: 6644 - DNA, 25 bp, Homo sapiens
tgtgccctggtgtggaaaagcctcc

SEQ ID NO: 6645 - DNA, 25 bp, Homo sapiens
agacggcaggtgtgctggacactca

SEQ ID NO: 6646 - DNA, 25 bp, Homo sapiens
cactagaagcgtgtggcgttggccc

SEQ ID NO: 6647 - DNA, 25 bp, Homo sapiens
tcagcgcggcgtgtgagtcctgaac

SEQ ID NO: 6648 - DNA, 25 bp, Homo sapiens
agtgttgctggtgtgcatgctccac

SEQ ID NO: 6649 - DNA, 25 bp, Homo sapiens
gcggtggcgtgtcgctgtaatacca

SEQ ID NO: 6650 - DNA, 25 bp, Homo sapiens
ggctgcagccgtgtgagccccgcat

SEQ ID NO: 6651 - DNA, 25 bp, Homo sapiens
caaggcagcgcgtgtgcaagaaagt

SEQ ID NO: 6652 - DNA, 25 bp, Homo sapiens
cagggacagagtggtaccaaggaac

SEQ ID NO: 6653 - DNA, 25 bp, Homo sapiens
caccctgtgcgtgtgcgagatgtat

SEQ ID NO: 6654 - DNA, 25 bp, Homo sapiens
tgtccatgtgcgtgtgcgcgtgcgc

SEQ ID NO: 6655 - DNA, 25 bp, Homo sapiens
tgtgtgtgcacgtgtctctgtgtgc

SEQ ID NO: 6656 - DNA, 25 bp, Homo sapiens
cgcgtgtgcgcgtgttgtgttccca

SEQ ID NO: 6657 - DNA, 25 bp, Homo sapiens
tcatgaggtgcgtgtgcaggctcca

SEQ ID NO: 6658 - DNA, 25 bp, Homo sapiens
gcagtgggcgtgtagaaggaacaaa

SEQ ID NO: 6659 - DNA, 25 bp, Homo sapiens
cagtgtgaggcgtgtgcaccactgc

SEQ ID NO: 6660 - DNA, 25 bp, Homo sapiens
cagaaagctcgtgtgcatgtgaggt

SEQ ID NO: 6661 - DNA, 25 bp, Homo sapiens
atggctgggagtggtgtctacacct

SEQ ID NO: 6662 - DNA, 25 bp, Homo sapiens
aaagtgagcgtgtgcgctgcaggag

SEQ ID NO: 6663 - DNA, 25 bp, Homo sapiens
catcttgtgccgtgtgtgtggtgtc

SEQ ID NO: 6664 - DNA, 25 bp, Homo sapiens
tgcatggtgcatgcgtgtgtatgta

SEQ ID NO: 6665 - DNA, 25 bp, Homo sapiens
tcatgtgggcgtgtgtgactaacag

SEQ ID NO: 6666 - DNA, 25 bp, Homo sapiens
tgtgtgcccgtgtgcatgtgtgtcc

SEQ ID NO: 6667 - DNA, 25 bp, Homo sapiens
gcgggcaagtggctgcgtctcccca

SEQ ID NO: 6668 - DNA, 25 bp, Homo sapiens
gatctcccagtggtgtgtgcgtgct

SEQ ID NO: 6669 - DNA, 25 bp, Homo sapiens
aattttagtgtgtgtgctactcaag

SEQ ID NO: 6670 - DNA, 25 bp, Homo sapiens
ccagctgccgcagtgtgtgcgtgaa

SEQ ID NO: 6671 - DNA, 25 bp, Homo sapiens
tgtcacatgtgcagtgtggtgtgac

SEQ ID NO: 6672 - DNA, 25 bp, Homo sapiens
cacagggctggtgaggccacccttt

SEQ ID NO: 6673 - DNA, 25 bp, Homo sapiens
cactgagctgggtgacaaatccact

SEQ ID NO: 6674 - DNA, 25 bp, Homo sapiens
cacgtgtgcggtgagtgtggcaggc

SEQ ID NO: 6675 - DNA, 25 bp, Homo sapiens
gatgcggatgcgtgaggctgcaagc

SEQ ID NO: 6676 - DNA, 25 bp, Homo sapiens
tgcaggctggcgtgaggactttacc

SEQ ID NO: 6677 - DNA, 25 bp, Homo sapiens
caaatatgtcgtgaggtgtgagttt

SEQ ID NO: 6678 - DNA, 25 bp, Homo sapiens
gtgtgtgtggtgattagcatgcctt

SEQ ID NO: 6679 - DNA, 25 bp, Homo sapiens
ccagggctggtgatggttccattca

SEQ ID NO: 6680 - DNA, 25 bp, Homo sapiens
taggctgtggtgatagtcctgtatc

SEQ ID NO: 6681 - DNA, 25 bp, Homo sapiens
tcctcagggtgatagcacacacact

SEQ ID NO: 6682 - DNA, 25 bp, Homo sapiens
tgcacacacggtgatatcttgcggg

SEQ ID NO: 6683 - DNA, 25 bp, Homo sapiens
tctgctgagtgcgtgaatgagcaga

SEQ ID NO: 6684 - DNA, 25 bp, Homo sapiens
ttgaaaggtgataaatgcagagact

SEQ ID NO: 6685 - DNA, 25 bp, Homo sapiens
ccatgtggcgcgtgatggaccagta

SEQ ID NO: 6686 - DNA, 25 bp, Homo sapiens
cccaggtggtgatgcgtgtgctcca

SEQ ID NO: 6687 - DNA, 25 bp, Homo sapiens
ggttaagtgacacacacgggcaact

SEQ ID NO: 6688 - DNA, 25 bp, Homo sapiens
acaatgaaagtgagcgagtgagtga

SEQ ID NO: 6689 - DNA, 25 bp, Homo sapiens
gatggcaggagtgatcataatttcc

SEQ ID NO: 6690 - DNA, 25 bp, Homo sapiens
tggtgcctgtgtgtacgttgtatgt

SEQ ID NO: 6691 - DNA, 25 bp, Homo sapiens
ccctcggagtgagtgtgtgcgcggc

SEQ ID NO: 6692 - DNA, 25 bp, Homo sapiens
ttgaccttgtggtgccgggccttgc

SEQ ID NO: 6693 - DNA, 25 bp, Homo sapiens
aatgtccgtgtgagggttcaaggcc

SEQ ID NO: 6694 - DNA, 25 bp, Homo sapiens
caccggcagtgtggcggcctctctg

SEQ ID NO: 6695 - DNA, 25 bp, Homo sapiens
cactggtggtgtggctttgaacaaa

SEQ ID NO: 6696 - DNA, 25 bp, Homo sapiens
aggagtggtgtggaccagcttccac

SEQ ID NO: 6697 - DNA, 25 bp, Homo sapiens
tcactggtgtgtgggtctccttagc

SEQ ID NO: 6698 - DNA, 25 bp, Homo sapiens
cggagcgagtgtggcatctctacca

SEQ ID NO: 6699 - DNA, 25 bp, Homo sapiens
caaggcgtgtgtgtactactatcat

SEQ ID NO: 6700 - DNA, 25 bp, Homo sapiens
ccaccttctgtggtaggctgctggc

SEQ ID NO: 6701 - DNA, 25 bp, Homo sapiens
tgtgtagtgtgtgtgcatttggcat

SEQ ID NO: 6702 - DNA, 25 bp, Homo sapiens
tggtgcctgtgtgtagtcccctact

SEQ ID NO: 6703 - DNA, 25 bp, Homo sapiens
cctctgccttgtggccctgtgtgag

SEQ ID NO: 6704 - DNA, 25 bp, Homo sapiens
caataggagtgtggtgtgtctaccc

SEQ ID NO: 6705 - DNA, 25 bp, Homo sapiens
cagcgtggtgtgtggtctcgtctct

SEQ ID NO: 6706 - DNA, 25 bp, Homo sapiens
gcctgtgtgtgtgggtgcacatttg

SEQ ID NO: 6707 - DNA, 25 bp, Homo sapiens
tgttgtgtgtgtggtatatagtatg

SEQ ID NO: 6708 - DNA, 25 bp, Homo sapiens
cagtgaggtgtgtggtatgtatgtt

SEQ ID NO: 6709 - DNA, 25 bp, Homo sapiens
acagagtgactgtggcatagaatcc

SEQ ID NO: 6710 - DNA, 25 bp, Homo sapiens
actgtgtgtgtgtgggtctacatac

SEQ ID NO: 6711 - DNA, 25 bp, Homo sapiens
aagcctgtgtgtggccgacgcatgc

SEQ ID NO: 6712 - DNA, 25 bp, Homo sapiens
gcttcctgtgtgtgtggatatttaa

SEQ ID NO: 6713 - DNA, 25 bp, Homo sapiens
tgccctggtgtgtgtggacgtacca

SEQ ID NO: 6714 - DNA, 25 bp, Homo sapiens
caggctgtggtgtgtcatggacttt

SEQ ID NO: 6715 - DNA, 25 bp, Homo sapiens
tagagtggtgtgtaccaagaccatc

SEQ ID NO: 6716 - DNA, 25 bp, Homo sapiens
tggagtgtgtgtgtgcccaccagtg

SEQ ID NO: 6717 - DNA, 25 bp, Homo sapiens
attcatggtgtgtgtgaaactcaaa

SEQ ID NO: 6718 - DNA, 25 bp, Homo sapiens
tccagggtgtgtgctgtccgcagcc

SEQ ID NO: 6719 - DNA, 25 bp, Homo sapiens
catgcagacgctgctgtggtcgaaa

SEQ ID NO: 6720 - DNA, 25 bp, Homo sapiens
catctgtggcttgtgtggttgtcaa

SEQ ID NO: 6721 - DNA, 25 bp, Homo sapiens
atgcaaggcgtgtgtgtactactat

SEQ ID NO: 6722 - DNA, 25 bp, Homo sapiens
aagccctgtgtgtgcctcgctgtcc

SEQ ID NO: 6723 - DNA, 25 bp, Homo sapiens
aagaccgtgtgtgagcggctagaca

SEQ ID NO: 6724 - DNA, 25 bp, Homo sapiens
taatgtggtgtgtgagcgagcctca

SEQ ID NO: 6725 - DNA, 25 bp, Homo sapiens
tgcgcttgctgtgtgtgtgctagct

SEQ ID NO: 6726 - DNA, 25 bp, Homo sapiens
cccctagtgtgtgcgtgttggacag

SEQ ID NO: 6727 - DNA, 25 bp, Homo sapiens
ctgtatgactgtgtgtgtttctgtc

SEQ ID NO: 6728 - DNA, 25 bp, Homo sapiens
ttgtccgtgtgtctgtccgcgcgcg

SEQ ID NO: 6729 - DNA, 25 bp, Homo sapiens
ggctgtgagtgtgttcatgggagaa

SEQ ID NO: 6730 - DNA, 25 bp, Homo sapiens
tggtccctgtgtgggccatctttgg

SEQ ID NO: 6731 - DNA, 25 bp, Homo sapiens
gatgctgacctgtgtggcctaagga

SEQ ID NO: 6732 - DNA, 25 bp, Homo sapiens
tgtggtgtctgtgtgtatgatgtca

SEQ ID NO: 6733 - DNA, 25 bp, Homo sapiens
ctctgtctagtgtgtgtgtggttga

SEQ ID NO: 6734 - DNA, 25 bp, Homo sapiens
acttgtgcgtgtgtgccttctaggg

SEQ ID NO: 6735 - DNA, 25 bp, Homo sapiens
gctatgagtgtgtgtgctctgtcta

SEQ ID NO: 6736 - DNA, 25 bp, Homo sapiens
tccctgtgtgtgtatctgtacccta

SEQ ID NO: 6737 - DNA, 25 bp, Homo sapiens
ggcaggctgctgtgttcttcatcca

SEQ ID NO: 6738 - DNA, 25 bp, Homo sapiens
catgtgtgagatgtgtgtgcacatg

SEQ ID NO: 6739 - DNA, 25 bp, Homo sapiens
aagtgtgcgtgtgtgctttttagcg

SEQ ID NO: 6740 - DNA, 25 bp, Homo sapiens
tcagtgtagtgtgtgcatgtccacc

SEQ ID NO: 6741 - DNA, 25 bp, Homo sapiens
ttcagtgcctgtgtgggtccaatag

SEQ ID NO: 6742 - DNA, 25 bp, Homo sapiens
ttttgattgtgtgggtgccccattt

SEQ ID NO: 6743 - DNA, 25 bp, Homo sapiens
caaattgtgtgtgtgctctccgcca

SEQ ID NO: 6744 - DNA, 25 bp, Homo sapiens
gatcccgtgtgtgtgcaaagtcaag

SEQ ID NO: 6745 - DNA, 25 bp, Homo sapiens
catagtctggtgtgtgtgcagaaat

SEQ ID NO: 6746 - DNA, 25 bp, Homo sapiens
tggctatgtgtgtgtgctatgtgtt

SEQ ID NO: 6747 - DNA, 25 bp, Homo sapiens
ttttgatgtgtgtgagcgtgagttt

SEQ ID NO: 6748 - DNA, 25 bp, Homo sapiens
gatccgtgtgtgtgagactttccca

SEQ ID NO: 6749 - DNA, 25 bp, Homo sapiens
gtgtgcgcctgtgtgggtgcacatt

SEQ ID NO: 6750 - DNA, 25 bp, Homo sapiens
gagcagcgtgctgtgttcaccagtg

SEQ ID NO: 6751 - DNA, 25 bp, Homo sapiens
cgcttgctgtgtgtgtgtgctagct

SEQ ID NO: 6752 - DNA, 25 bp, Homo sapiens
caggcatgtagtgtgtgctgagcac

SEQ ID NO: 6753 - DNA, 25 bp, Homo sapiens
aacgttgtgtgtgggtgcaatgcac

SEQ ID NO: 6754 - DNA, 25 bp, Homo sapiens
ggtgcaatgtgtgtgcaaaggccca

SEQ ID NO: 6755 - DNA, 25 bp, Homo sapiens
caccagggtgtgtgtggtgtcccca

SEQ ID NO: 6756 - DNA, 25 bp, Homo sapiens
ggctatgagtgtgtgtgctctgtct

SEQ ID NO: 6757 - DNA, 25 bp, Homo sapiens
gtgcgcctgtgtgtgtgggtgcctg

SEQ ID NO: 6758 - DNA, 25 bp, Homo sapiens
agtccagcatgtgtgtgtgccagga

SEQ ID NO: 6759 - DNA, 25 bp, Homo sapiens
gtccacgtgtgtgaggatgaactcc

SEQ ID NO: 6760 - DNA, 25 bp, Homo sapiens
tgagtgcatgagtgtgtgacatttg

SEQ ID NO: 6761 - DNA, 25 bp, Homo sapiens
gcatgtgtgagatgtgtgtgcacat

SEQ ID NO: 6762 - DNA, 25 bp, Homo sapiens
cttgctgtgtgtgtgtgctagctgt

SEQ ID NO: 6763 - DNA, 25 bp, Homo sapiens
tgtgtgcctctgtgtgcacgtacac

SEQ ID NO: 6764 - DNA, 25 bp, Homo sapiens
tgtatgacgctgtgtgtgtgtctct

SEQ ID NO: 6765 - DNA, 25 bp, Homo sapiens
taaccctgtgtgtgttgtcaggcct

SEQ ID NO: 6766 - DNA, 25 bp, Homo sapiens
tttagtgcatgtgttgccaaagtga

SEQ ID NO: 6767 - DNA, 25 bp, Homo sapiens
accaagatgatgtgtggagtggaca

SEQ ID NO: 6768 - DNA, 25 bp, Homo sapiens
tatgtgtgtcatgtgtgtcatatgt

SEQ ID NO: 6769 - DNA, 25 bp, Homo sapiens
cagggcaggcatgtgtattgtttcc

SEQ ID NO: 6770 - DNA, 25 bp, Homo sapiens
cccgggtgtgagtgcgagtgagcgc

SEQ ID NO: 6771 - DNA, 25 bp, Homo sapiens
tgcagtgccctgtgaggtattccca

SEQ ID NO: 6772 - DNA, 25 bp, Homo sapiens
aagcaggtgtgtgaaagacgatcca

SEQ ID NO: 6773 - DNA, 25 bp, Homo sapiens
tgagttggtgtgaattatgtatgag

SEQ ID NO: 6774 - DNA, 25 bp, Homo sapiens
tgcatgtgtgagatgtgtgtgcaca

SEQ ID NO: 6775 - DNA, 25 bp, Homo sapiens
tctgcaggtgtgtgaattgcaccat

SEQ ID NO: 6776 - DNA, 25 bp, Homo sapiens
cgttgatgcgtgtgaccgacattga

SEQ ID NO: 6777 - DNA, 25 bp, Homo sapiens
gggcatgtgtgtgaagatcatccct

SEQ ID NO: 6778 - DNA, 25 bp, Homo sapiens
gtgtgagtgtgtgagtaggagagag

SEQ ID NO: 6779 - DNA, 25 bp, Homo sapiens
cagcaatcgcagtgtgagggtgacc

SEQ ID NO: 6780 - DNA, 25 bp, Homo sapiens
tgaggctgggtgctcaggaaggccc

SEQ ID NO: 6781 - DNA, 25 bp, Homo sapiens
aagtggcggtgctgcttcttcctgc

SEQ ID NO: 6782 - DNA, 25 bp, Homo sapiens
tggagaccgtgcgtgccatacggaa

SEQ ID NO: 6783 - DNA, 25 bp, Homo sapiens
aaatggcggtgcgatggagcatact

SEQ ID NO: 6784 - DNA, 25 bp, Homo sapiens
gccagccggtgcgtcctttaatcct

SEQ ID NO: 6785 - DNA, 25 bp, Homo sapiens
tgatcttcatggtgcgtgtgcggca

SEQ ID NO: 6786 - DNA, 25 bp, Homo sapiens
tcagttgctggtgcgacaagatcct

SEQ ID NO: 6787 - DNA, 25 bp, Homo sapiens
gcggctgctcgtgctggctgttcca

SEQ ID NO: 6788 - DNA, 25 bp, Homo sapiens
ggtggctggtgctcgtatctacaaa

SEQ ID NO: 6789 - DNA, 25 bp, Homo sapiens
tacattcatggtgcccgtgtgtgtg

SEQ ID NO: 6790 - DNA, 25 bp, Homo sapiens
cactgtggatgcgtgcgtgctccag

SEQ ID NO: 6791 - DNA, 25 bp, Homo sapiens
tggaggcaggtgcttctactgctgc

SEQ ID NO: 6792 - DNA, 25 bp, Homo sapiens
tgctctgatgcggtgctgcgtctcc

SEQ ID NO: 6793 - DNA, 25 bp, Homo sapiens
caacgatgctggtgctcagggtaca

SEQ ID NO: 6794 - DNA, 25 bp, Homo sapiens
aagggctggtgctctttggtagaaa

SEQ ID NO: 6795 - DNA, 25 bp, Homo sapiens
aaattggtgtgctggtgtgtaccca

SEQ ID NO: 6796 - DNA, 25 bp, Homo sapiens
tagggtctgtgccaatatgcgaatc

SEQ ID NO: 6797 - DNA, 25 bp, Homo sapiens
tcgaggctggtgcaaacctggcatg

SEQ ID NO: 6798 - DNA, 25 bp, Homo sapiens
tgatggcgtggtgcagagatcaact

SEQ ID NO: 6799 - DNA, 25 bp, Homo sapiens
ggaggtctgtgccacgtatgccatc

SEQ ID NO: 6800 - DNA, 25 bp, Homo sapiens
acgagcgaggtgcaggctccatgaa

SEQ ID NO: 6801 - DNA, 25 bp, Homo sapiens
gatctgttgagtgcaatcatctcac

SEQ ID NO: 6802 - DNA, 25 bp, Homo sapiens
tcccagcgtgtgcatgttgttacag

SEQ ID NO: 6803 - DNA, 25 bp, Homo sapiens
caccctgtgtgtgcaggagctatgc

SEQ ID NO: 6804 - DNA, 25 bp, Homo sapiens
cctattgtgtgtgcaggaggcctgt

SEQ ID NO: 6805 - DNA, 25 bp, Homo sapiens
accctgtgtgtgcaggagctatgct

SEQ ID NO: 6806 - DNA, 25 bp, Homo sapiens
caggcctgtgtgtgcctttcctggc

SEQ ID NO: 6807 - DNA, 25 bp, Homo sapiens
tccatgtgcgtgtgcgcgtgcgcgc

SEQ ID NO: 6808 - DNA, 25 bp, Homo sapiens
tgcagacgtgtgtgccagactgtcc

SEQ ID NO: 6809 - DNA, 25 bp, Homo sapiens
ttgtgtgtgtgtgcccgtgtccatg

SEQ ID NO: 6810 - DNA, 25 bp, Homo sapiens
tcactgtgtgatgtgcgatgagcca

SEQ ID NO: 6811 - DNA, 25 bp, Homo sapiens
tctagaggctgtgctggtccctgta

SEQ ID NO: 6812 - DNA, 25 bp, Homo sapiens
ctgtggtcctgtgcaaatgtcttag

SEQ ID NO: 6813 - DNA, 25 bp, Homo sapiens
tatgagtgtgtgtgctctgtctagt

SEQ ID NO: 6814 - DNA, 25 bp, Homo sapiens
tgtgaatagtgtgcatgtgtgtcga

SEQ ID NO: 6815 - DNA, 25 bp, Homo sapiens
gatgtgtggtgtgctctgcccagca

SEQ ID NO: 6816 - DNA, 25 bp, Homo sapiens
ctatgagtgtgtgtgctctgtctag

SEQ ID NO: 6817 - DNA, 25 bp, Homo sapiens
gtgggtgtgtgcatgagcgtggacc

SEQ ID NO: 6818 - DNA, 25 bp, Homo sapiens
tctggtgcgtgtgcatgagcttgta

SEQ ID NO: 6819 - DNA, 25 bp, Homo sapiens
aacacaggtgtgctgggctctgagc

SEQ ID NO: 6820 - DNA, 25 bp, Homo sapiens
caggccctgtgtgcttgctgcctct

SEQ ID NO: 6821 - DNA, 25 bp, Homo sapiens
gctaatgatgtgtgcatgtgccaga

SEQ ID NO: 6822 - DNA, 25 bp, Homo sapiens
tgtgcgtgcgtgtgcatgcatatat

SEQ ID NO: 6823 - DNA, 25 bp, Homo sapiens
catgcatacgtgtgtgcatagacct

SEQ ID NO: 6824 - DNA, 25 bp, Homo sapiens
caggcggctcctttctgtgcccagt

SEQ ID NO: 6825 - DNA, 25 bp, Homo sapiens
tgcccaatcctttgattagtcaatg

SEQ ID NO: 6826 - DNA, 25 bp, Homo sapiens
tctttcgcctttctttctggagtcg

SEQ ID NO: 6827 - DNA, 25 bp, Homo sapiens
tagagcttgccttgcttaatgagca

SEQ ID NO: 6828 - DNA, 25 bp, Homo sapiens
gctgagctgagccttgcgacccggt

SEQ ID NO: 6829 - DNA, 25 bp, Homo sapiens
cctgcaggtgccttgctgtggtccc

SEQ ID NO: 6830 - DNA, 25 bp, Homo sapiens
tcagacgacacttggttgagcccag

SEQ ID NO: 6831 - DNA, 25 bp, Homo sapiens
gttccacctacaggacacagactca

SEQ ID NO: 6832 - DNA, 25 bp, Homo sapiens
aagcccacactactatcctctttgt

SEQ ID NO: 6833 - DNA, 25 bp, Homo sapiens
cacaccaacactaattcgtttggga

SEQ ID NO: 6834 - DNA, 25 bp, Homo sapiens
ttacaaactaagacacaaccacgca

SEQ ID NO: 6835 - DNA, 25 bp, Homo sapiens
ttagcacacactaaacctagtttag

SEQ ID NO: 6836 - DNA, 25 bp, Homo sapiens
tttcagcagcactaacaatgtaggg

SEQ ID NO: 6837 - DNA, 25 bp, Homo sapiens
attgagccagcactagcacccagat

SEQ ID NO: 6838 - DNA, 25 bp, Homo sapiens
gaaccttcttcggagacctgctgct

SEQ ID NO: 6839 - DNA, 25 bp, Homo sapiens
tcggcagcgtctttggagcaaggca

SEQ ID NO: 6840 - DNA, 25 bp, Homo sapiens
tgtgcatgtgtgtcttcagccgaat

SEQ ID NO: 6841 - DNA, 25 bp, Homo sapiens
gaaccctcttctgtgtgtgcaaagt

SEQ ID NO: 6842 - DNA, 25 bp, Homo sapiens
taagaggctcttcacacacaacagg

SEQ ID NO: 6843 - DNA, 25 bp, Homo sapiens
acgcactcgctcttgggagaagaga

SEQ ID NO: 6844 - DNA, 25 bp, Homo sapiens
gagtagaatctacacacgcaaagca

SEQ ID NO: 6845 - DNA, 25 bp, Homo sapiens
cacagccagcctctatgagaagtta

SEQ ID NO: 6846 - DNA, 25 bp, Homo sapiens
agacgtccctccctattgcacatgg

SEQ ID NO: 6847 - DNA, 25 bp, Homo sapiens
ggcaccacctccactattcaggaag

SEQ ID NO: 6848 - DNA, 25 bp, Homo sapiens
caccacaacctctggaaatcaatta

SEQ ID NO: 6849 - DNA, 25 bp, Homo sapiens
ttatgaagactccacaccactcata

SEQ ID NO: 6850 - DNA, 25 bp, Homo sapiens
aacctcaactcggtggtgctgcggc

SEQ ID NO: 6851 - DNA, 25 bp, Homo sapiens
ggaaaactccacacacaaagcacct

SEQ ID NO: 6852 - DNA, 25 bp, Homo sapiens
ttcagataactcaccaccacctttg

SEQ ID NO: 6853 - DNA, 25 bp, Homo sapiens
attcacacacactcctatattgcca

SEQ ID NO: 6854 - DNA, 25 bp, Homo sapiens
cagacaacacactccaggaaacaga

SEQ ID NO: 6855 - DNA, 25 bp, Homo sapiens
ggtcacacactcgtaagcaacagaa

SEQ ID NO: 6856 - DNA, 25 bp, Homo sapiens
cagcgcacgcgcactcgatgcctct

SEQ ID NO: 6857 - DNA, 25 bp, Homo sapiens
gcaatatcatcaccacacgcactta

SEQ ID NO: 6858 - DNA, 25 bp, Homo sapiens
gagagtccctcaggtgtgtggcaac

SEQ ID NO: 6859 - DNA, 25 bp, Homo sapiens
tcacacacatgcctcaggtgggctg

SEQ ID NO: 6860 - DNA, 25 bp, Homo sapiens
agccaccacactcagacttaagtgt

SEQ ID NO: 6861 - DNA, 25 bp, Homo sapiens
tattcacacactcaaagggtccagg

SEQ ID NO: 6862 - DNA, 25 bp, Homo sapiens
ctccagacacactcagaattgaatt

SEQ ID NO: 6863 - DNA, 25 bp, Homo sapiens
ctgaaatagcactcacacctaggtt

SEQ ID NO: 6864 - DNA, 25 bp, Homo sapiens
caggagacacactcacggagcctcg

SEQ ID NO: 6865 - DNA, 25 bp, Homo sapiens
tggcccacactcactagcagtgtaa

SEQ ID NO: 6866 - DNA, 25 bp, Homo sapiens
gttgatccactcacacacttagctg

SEQ ID NO: 6867 - DNA, 25 bp, Homo sapiens
tgaatcatccactcacacagaggct

SEQ ID NO: 6868 - DNA, 25 bp, Homo sapiens
cacacacagcatactcatcttcttt

SEQ ID NO: 6869 - DNA, 25 bp, Homo sapiens
cgcgggtcgcgcccttcatgaagat

SEQ ID NO: 6870 - DNA, 25 bp, Homo sapiens
tgtgagcaggtctctaagccttggt

SEQ ID NO: 6871 - DNA, 25 bp, Homo sapiens
agtgtgtgtgtctctacccagctct

SEQ ID NO: 6872 - DNA, 25 bp, Homo sapiens
gcagggagtctcagaatggtttcca

SEQ ID NO: 6873 - DNA, 25 bp, Homo sapiens
cattggtgtggctttgggcaggttc

SEQ ID NO: 6874 - DNA, 25 bp, Homo sapiens
gaggcagggcttctaagcctctgag

SEQ ID NO: 6875 - DNA, 25 bp, Homo sapiens
cacaggctctggcttgaggagattt

SEQ ID NO: 6876 - DNA, 25 bp, Homo sapiens
tgtcggcaggcttggcaaagatgct

SEQ ID NO: 6877 - DNA, 25 bp, Homo sapiens
cacctgtgtggcttgtgtgtgcccc

SEQ ID NO: 6878 - DNA, 25 bp, Homo sapiens
ccgcacaccgcttctcttaatggaa

SEQ ID NO: 6879 - DNA, 25 bp, Homo sapiens
caccacaccgcttgtgattctcagg

SEQ ID NO: 6880 - DNA, 25 bp, Homo sapiens
agtgtgtgtgcgcttggttcagtaa

SEQ ID NO: 6881 - DNA, 25 bp, Homo sapiens
ctgtgtgtacgcttgtgtgtgcgct

SEQ ID NO: 6882 - DNA, 25 bp, Homo sapiens
gggcatacgcttgacacacacgcat

SEQ ID NO: 6883 - DNA, 25 bp, Homo sapiens
tgccactgaagctaacacacctatg

SEQ ID NO: 6884 - DNA, 25 bp, Homo sapiens
gtgcaggctggctaaatccaaaaag

SEQ ID NO: 6885 - DNA, 25 bp, Homo sapiens
catgatgttgcaggctacccaggtc

SEQ ID NO: 6886 - DNA, 25 bp, Homo sapiens
cacacccacagctaagacgctggga

SEQ ID NO: 6887 - DNA, 25 bp, Homo sapiens
gctcacacaggctagcagacagcag

SEQ ID NO: 6888 - DNA, 25 bp, Homo sapiens
taagaagatgcttaagttccattgc

SEQ ID NO: 6889 - DNA, 25 bp, Homo sapiens
cggattttgctttcgctgccgcgag

SEQ ID NO: 6890 - DNA, 25 bp, Homo sapiens
tctggtggtgcttgtctgagcagcc

SEQ ID NO: 6891 - DNA, 25 bp, Homo sapiens
tgctgtgggctgctagaaacttcat

SEQ ID NO: 6892 - DNA, 25 bp, Homo sapiens
cgcaaggctgctgctagaccaggcg

SEQ ID NO: 6893 - DNA, 25 bp, Homo sapiens
tgtggctggtgctagtttgaactgc

SEQ ID NO: 6894 - DNA, 25 bp, Homo sapiens
gctgacatccgctccaacaggtttc

SEQ ID NO: 6895 - DNA, 25 bp, Homo sapiens
tgacagccagcatgctacccagtgt

SEQ ID NO: 6896 - DNA, 25 bp, Homo sapiens
gactggctggctcgcccacggagaa

SEQ ID NO: 6897 - DNA, 25 bp, Homo sapiens
gacagcagacagctccggtatgagg

SEQ ID NO: 6898 - DNA, 25 bp, Homo sapiens
gcagaggtgagctctcgctggccat

SEQ ID NO: 6899 - DNA, 25 bp, Homo sapiens
agtggcgctggctcatgaataatca

SEQ ID NO: 6900 - DNA, 25 bp, Homo sapiens
tagatggatggctcacttactggca

SEQ ID NO: 6901 - DNA, 25 bp, Homo sapiens
ggcccaggctcatgaagccgcagca

SEQ ID NO: 6902 - DNA, 25 bp, Homo sapiens
catcataacaagctcacacatgcgc

SEQ ID NO: 6903 - DNA, 25 bp, Homo sapiens
gctgctcggtgctccaagtgaagcg

SEQ ID NO: 6904 - DNA, 25 bp, Homo sapiens
ttctctgccatgctcacaccgttgg

SEQ ID NO: 6905 - DNA, 25 bp, Homo sapiens
tggtggctgtgctccaagagtaagc

SEQ ID NO: 6906 - DNA, 25 bp, Homo sapiens
gtggctggtgctcgtatctacaaaa

SEQ ID NO: 6907 - DNA, 25 bp, Homo sapiens
atgagtgtgtgtgctctgtctagtg

SEQ ID NO: 6908 - DNA, 25 bp, Homo sapiens
gcacccactgctcagacacgagaga

SEQ ID NO: 6909 - DNA, 25 bp, Homo sapiens
aaaggccctgggcaattagctcctc

SEQ ID NO: 6910 - DNA, 25 bp, Homo sapiens
tgtgacccactggtgcgcgtggctc

SEQ ID NO: 6911 - DNA, 25 bp, Homo sapiens
ctccaggtcctggtgtgtgcctctt

SEQ ID NO: 6912 - DNA, 25 bp, Homo sapiens
tctactgccctgttgtggaatttta

SEQ ID NO: 6913 - DNA, 25 bp, Homo sapiens
agtggagcgcctgtggatttagccg

SEQ ID NO: 6914 - DNA, 25 bp, Homo sapiens
tcactttcctgtgcgtggctgtggc

SEQ ID NO: 6915 - DNA, 25 bp, Homo sapiens
gacttgccctgtgcgctgtggtaca

SEQ ID NO: 6916 - DNA, 25 bp, Homo sapiens
ttcatgttcctgtgacctgtgtggt

SEQ ID NO: 6917 - DNA, 25 bp, Homo sapiens
gtgtgtgcgcctgtgtgggtgcaca

SEQ ID NO: 6918 - DNA, 25 bp, Homo sapiens
aaggtggactggagctccctctgaa

SEQ ID NO: 6919 - DNA, 25 bp, Homo sapiens
tgtcatgtacctgtggctgctcaat

SEQ ID NO: 6920 - DNA, 25 bp, Homo sapiens
gagcggcgcactggtccaggtagag

SEQ ID NO: 6921 - DNA, 25 bp, Homo sapiens
tgcacgcacgactggatggcaggct

SEQ ID NO: 6922 - DNA, 25 bp, Homo sapiens
gcatcatggtgactggaggtgcctc

SEQ ID NO: 6923 - DNA, 25 bp, Homo sapiens
cgaagtaactgtggctggtgctgtc

SEQ ID NO: 6924 - DNA, 25 bp, Homo sapiens
tctgatgcagcacctgacaagggcc

SEQ ID NO: 6925 - DNA, 25 bp, Homo sapiens
cacaggaacctgagctccacaggac

SEQ ID NO: 6926 - DNA, 25 bp, Homo sapiens
caacaatacctgatacgatgaaaaa

SEQ ID NO: 6927 - DNA, 25 bp, Homo sapiens
cactgggtactgatggcttggctgt

SEQ ID NO: 6928 - DNA, 25 bp, Homo sapiens
catcaccaccactgacaaggtgagg

SEQ ID NO: 6929 - DNA, 25 bp, Homo sapiens
cttccatagtctggtgtgtgtgcag

SEQ ID NO: 6930 - DNA, 25 bp, Homo sapiens
ttccatagtctggtgtgtgtgcaga

SEQ ID NO: 6931 - DNA, 25 bp, Homo sapiens
gctgcgtgcgtctgtgtggttacta

SEQ ID NO: 6932 - DNA, 25 bp, Homo sapiens
cacagacacattctgtacacacaga

SEQ ID NO: 6933 - DNA, 25 bp, Homo sapiens
tatagctgctgtctgtctagcccag

SEQ ID NO: 6934 - DNA, 25 bp, Homo sapiens
cttgggtgtctgtgtgaatttatca

SEQ ID NO: 6935 - DNA, 25 bp, Homo sapiens
tcgacagctcatctgttaggctaag

SEQ ID NO: 6936 - DNA, 25 bp, Homo sapiens
tgttttgatctgacgcaggcttatg

SEQ ID NO: 6937 - DNA, 25 bp, Homo sapiens
ggtctccctgcgcacacggctgact

SEQ ID NO: 6938 - DNA, 25 bp, Homo sapiens
tcgtgtgagactgctgtgtgtgaca

SEQ ID NO: 6939 - DNA, 25 bp, Homo sapiens
gtcatgtacactgcacgctcgctag

SEQ ID NO: 6940 - DNA, 25 bp, Homo sapiens
tgagggctactgcatctccattctc

SEQ ID NO: 6941 - DNA, 25 bp, Homo sapiens
tatgtgtgtgtctgcgcaagtgaga

SEQ ID NO: 6942 - DNA, 25 bp, Homo sapiens
catggctgggtctgctacattacaa

SEQ ID NO: 6943 - DNA, 25 bp, Homo sapiens
cctgtgtgtgtctgcgcaggtctgt

SEQ ID NO: 6944 - DNA, 25 bp, Homo sapiens
gcatgcgggtctgctcacacatatg

SEQ ID NO: 6945 - DNA, 25 bp, Homo sapiens
tcctttggctgctggtaggcttaca

SEQ ID NO: 6946 - DNA, 25 bp, Homo sapiens
ctttcttggctggacggaggcttgc

SEQ ID NO: 6947 - DNA, 25 bp, Homo sapiens
caagtaaggctggtagtggaacata

SEQ ID NO: 6948 - DNA, 25 bp, Homo sapiens
ctggaggtggctgtctgggaaacac

SEQ ID NO: 6949 - DNA, 25 bp, Homo sapiens
tggtgctgaggctgtcttcattgag

SEQ ID NO: 6950 - DNA, 25 bp, Homo sapiens
tcttgtgggctgtgaattacactga

SEQ ID NO: 6951 - DNA, 25 bp, Homo sapiens
gacaggaggctggaaaagatgacct

SEQ ID NO: 6952 - DNA, 25 bp, Homo sapiens
tcaggcagagcgctggcgagatttc

SEQ ID NO: 6953 - DNA, 25 bp, Homo sapiens
gcgcgcggagctggcggcgtcgccg

SEQ ID NO: 6954 - DNA, 25 bp, Homo sapiens
cgtggctgtgcgctgttcatctaat

SEQ ID NO: 6955 - DNA, 25 bp, Homo sapiens
cggagactgagctgaacggaaagtt

SEQ ID NO: 6956 - DNA, 25 bp, Homo sapiens
aaacagtggctgactgaattgggcc

SEQ ID NO: 6957 - DNA, 25 bp, Homo sapiens
tgctgtgtgctagctgtgtgtacgc

SEQ ID NO: 6958 - DNA, 25 bp, Homo sapiens
ggagcgcacgctgacacatttaacg

SEQ ID NO: 6959 - DNA, 25 bp, Homo sapiens
gtacatcttgctggaaaatgctgcc

SEQ ID NO: 6960 - DNA, 25 bp, Homo sapiens
tacagcgtggctgatgctgctcctg

SEQ ID NO: 6961 - DNA, 25 bp, Homo sapiens
caaattggctgctgtatcccgtaga

SEQ ID NO: 6962 - DNA, 25 bp, Homo sapiens
cccagtgtgtgctgtgggacagaat

SEQ ID NO: 6963 - DNA, 25 bp, Homo sapiens
ccacacacagtgctgggacacttac

SEQ ID NO: 6964 - DNA, 25 bp, Homo sapiens
ctggatgtggctgctggcttcattc

SEQ ID NO: 6965 - DNA, 25 bp, Homo sapiens
tctgcgaggctgctggttggcgtct

SEQ ID NO: 6966 - DNA, 25 bp, Homo sapiens
tcggctgcttgctgtgagatgacac

SEQ ID NO: 6967 - DNA, 25 bp, Homo sapiens
aaggctggtgctgagagagttagca

SEQ ID NO: 6968 - DNA, 25 bp, Homo sapiens
cgatcgatggtgctgtgccacataa

SEQ ID NO: 6969 - DNA, 25 bp, Homo sapiens
gcaacgtggctgcttggtgtcctca

SEQ ID NO: 6970 - DNA, 25 bp, Homo sapiens
agtgctcgggctgcgtgtgccagaa

SEQ ID NO: 6971 - DNA, 25 bp, Homo sapiens
gcatagatgctgtgctgcttccctc

SEQ ID NO: 6972 - DNA, 25 bp, Homo sapiens
gatgagggctgctgcaatgttcagc

SEQ ID NO: 6973 - DNA, 25 bp, Homo sapiens
aatgcagtggagctgcggagactcc

SEQ ID NO: 6974 - DNA, 25 bp, Homo sapiens
caagcactgtggctgcatattccaa

SEQ ID NO: 6975 - DNA, 25 bp, Homo sapiens
gcacatcacacagctgcacatgaac

SEQ ID NO: 6976 - DNA, 25 bp, Homo sapiens
tctagtcaaaaaagcacccacacgg

SEQ ID NO: 6977 - DNA, 25 bp, Homo sapiens
gaccctaaaagcacacacaagtctg

SEQ ID NO: 6978 - DNA, 25 bp, Homo sapiens
tttttaaaatcatgcctgccagccc

SEQ ID NO: 6979 - DNA, 25 bp, Homo sapiens
gatgatcacataaaacagatttgca

SEQ ID NO: 6980 - DNA, 25 bp, Homo sapiens
cacacacaaaaaccagatgacaaca

SEQ ID NO: 6981 - DNA, 25 bp, Homo sapiens
taatgagaaaaccagccagccagga

SEQ ID NO: 6982 - DNA, 25 bp, Homo sapiens
tgagcaccaaaaccagccaatctga

SEQ ID NO: 6983 - DNA, 25 bp, Homo sapiens
tgcactcaaaaacacgcacgggctg

SEQ ID NO: 6984 - DNA, 25 bp, Homo sapiens
gttctaaaacacacccttcagtggc

SEQ ID NO: 6985 - DNA, 25 bp, Homo sapiens
ctttcacaaaacacaaagtgcttct

SEQ ID NO: 6986 - DNA, 25 bp, Homo sapiens
gtaagaaaacacacatggccaggtg

SEQ ID NO: 6987 - DNA, 25 bp, Homo sapiens
actttgtaaaccaccaccacattag

SEQ ID NO: 6988 - DNA, 25 bp, Homo sapiens
tcagcccaaaacaagcagtgacggt

SEQ ID NO: 6989 - DNA, 25 bp, Homo sapiens
tgggttaaacacaggcactacagcc

SEQ ID NO: 6990 - DNA, 25 bp, Homo sapiens
ggaagataaacacgcagcacgcctt

SEQ ID NO: 6991 - DNA, 25 bp, Homo sapiens
aaaacgaaaaccacacgcagccgtg

SEQ ID NO: 6992 - DNA, 25 bp, Homo sapiens
gttcagtgaaacagagggaatgaag

SEQ ID NO: 6993 - DNA, 25 bp, Homo sapiens
tccagagcagaaaccaaacactcat

SEQ ID NO: 6994 - DNA, 25 bp, Homo sapiens
gatgatttaaagacacacactggtg

SEQ ID NO: 6995 - DNA, 25 bp, Homo sapiens
tttaggaaagtctcaggccaggcga

SEQ ID NO: 6996 - DNA, 25 bp, Homo sapiens
atgtacccaaaagcgccaatcctgt

SEQ ID NO: 6997 - DNA, 25 bp, Homo sapiens
atgccagcccaaaaaccagtcgtca

SEQ ID NO: 6998 - DNA, 25 bp, Homo sapiens
caacagcaccaaaaggaccaaggaa

SEQ ID NO: 6999 - DNA, 25 bp, Homo sapiens
tgaaagcacaaacacagtccttcgc

SEQ ID NO: 7000 - DNA, 25 bp, Homo sapiens
catttaccaaacacagaccaggcac

SEQ ID NO: 7001 - DNA, 25 bp, Homo sapiens
taatcccaaacagcaggcaatataa

SEQ ID NO: 7002 - DNA, 25 bp, Homo sapiens
tacagtacaaacaaggctgagggtc

SEQ ID NO: 7003 - DNA, 25 bp, Homo sapiens
ctaccgcagcaaacagacgccaaaa

SEQ ID NO: 7004 - DNA, 25 bp, Homo sapiens
cagccaccacaaaagaagccgtgta

SEQ ID NO: 7005 - DNA, 25 bp, Homo sapiens
taccaccaaacacggagggacatcc

SEQ ID NO: 7006 - DNA, 25 bp, Homo sapiens
ttaggcacaaacaccaaatcatgct

SEQ ID NO: 7007 - DNA, 25 bp, Homo sapiens
ttaatgacaaacaccgcaattactt

SEQ ID NO: 7008 - DNA, 25 bp, Homo sapiens
tccaggacaaacacacgaatcttag

SEQ ID NO: 7009 - DNA, 25 bp, Homo sapiens
gtttgtcaaacacacaggctacctg

SEQ ID NO: 7010 - DNA, 25 bp, Homo sapiens
cagcagcaccacaaacacgagtaat

SEQ ID NO: 7011 - DNA, 25 bp, Homo sapiens
tccgtcacaaacacacacggcattt

SEQ ID NO: 7012 - DNA, 25 bp, Homo sapiens
gcacactcacaaacagctgatctgg

SEQ ID NO: 7013 - DNA, 25 bp, Homo sapiens
cgatcaccgcaaacatcagcatgga

SEQ ID NO: 7014 - DNA, 25 bp, Homo sapiens
accagccacaaagagccatatttgt

SEQ ID NO: 7015 - DNA, 25 bp, Homo sapiens
aaatgatatgcaaacgacacacaaa

SEQ ID NO: 7016 - DNA, 25 bp, Homo sapiens
tttcttcaaagcagcacacatcacc

SEQ ID NO: 7017 - DNA, 25 bp, Homo sapiens
caataagaaaattcacacacactcc

SEQ ID NO: 7018 - DNA, 25 bp, Homo sapiens
tgccagccagcaaatccctagagtt

SEQ ID NO: 7019 - DNA, 25 bp, Homo sapiens
gcacaccgcaaatatgatgacctga

SEQ ID NO: 7020 - DNA, 25 bp, Homo sapiens
gcaagttgtaaacaccaccacactc

SEQ ID NO: 7021 - DNA, 25 bp, Homo sapiens
acacttgtgcaaatcacaccacaca

SEQ ID NO: 7022 - DNA, 25 bp, Homo sapiens
ttggttgtaaacaccaccgcatcac

SEQ ID NO: 7023 - DNA, 25 bp, Homo sapiens
tactttgtaaaccaccaccacatta

SEQ ID NO: 7024 - DNA, 25 bp, Homo sapiens
tgcctgtgctgtaacaaggttggag

SEQ ID NO: 7025 - DNA, 25 bp, Homo sapiens
ggaccctaaaacaccacacctgatg

SEQ ID NO: 7026 - DNA, 25 bp, Homo sapiens
tagttcctaaaactcaagggcacgc

SEQ ID NO: 7027 - DNA, 25 bp, Homo sapiens
gtgggatgctaaaccctggctggcc

SEQ ID NO: 7028 - DNA, 25 bp, Homo sapiens
cagtggcgatgtaatgaaagtggtc

SEQ ID NO: 7029 - DNA, 25 bp, Homo sapiens
gcaatgcagtctaatgggaaagcca

SEQ ID NO: 7030 - DNA, 25 bp, Homo sapiens
ttcacacactaatctacccattcat

SEQ ID NO: 7031 - DNA, 25 bp, Homo sapiens
cgagggtataaaagcacacagcaca

SEQ ID NO: 7032 - DNA, 25 bp, Homo sapiens
gcttgcaggataacacacactctag

SEQ ID NO: 7033 - DNA, 25 bp, Homo sapiens
taagctgtgataacccaccaccatt

SEQ ID NO: 7034 - DNA, 25 bp, Homo sapiens
gctacatcaataagcacacaccagt

SEQ ID NO: 7035 - DNA, 25 bp, Homo sapiens
tgtgtgtgccataactgagctcggt

SEQ ID NO: 7036 - DNA, 25 bp, Homo sapiens
cggaaacaaccaggagcactattcc

SEQ ID NO: 7037 - DNA, 25 bp, Homo sapiens
gaaatacaacgcaccaaaactcgcg

SEQ ID NO: 7038 - DNA, 25 bp, Homo sapiens
gggatcagaacccacacaccgttaa

SEQ ID NO: 7039 - DNA, 25 bp, Homo sapiens
tcccctcaacagcactctttccaat

SEQ ID NO: 7040 - DNA, 25 bp, Homo sapiens
caaaccaaaccaacactgaatgaac

SEQ ID NO: 7041 - DNA, 25 bp, Homo sapiens
tgcacacataaacctccatccatag

SEQ ID NO: 7042 - DNA, 25 bp, Homo sapiens
attctgtaaacccaaccacacctgg

SEQ ID NO: 7043 - DNA, 25 bp, Homo sapiens
taaacaaaccgaggtgtgagcatgc

SEQ ID NO: 7044 - DNA, 25 bp, Homo sapiens
ggctttaaccaccacaagcacctga

SEQ ID NO: 7045 - DNA, 25 bp, Homo sapiens
gataagtaaccagccacaggacgga

SEQ ID NO: 7046 - DNA, 25 bp, Homo sapiens
gatgtgacaaaccagacaacgaaga

SEQ ID NO: 7047 - DNA, 25 bp, Homo sapiens
gagttgccaaccaaccggtcgtcag

SEQ ID NO: 7048 - DNA, 25 bp, Homo sapiens
ggagccaaaccacacaggaaagtct

SEQ ID NO: 7049 - DNA, 25 bp, Homo sapiens
ggcttcgaaccgtggctgccatgtg

SEQ ID NO: 7050 - DNA, 25 bp, Homo sapiens
catcactgcagaaaccacactcaat

SEQ ID NO: 7051 - DNA, 25 bp, Homo sapiens
aggctgcggaacctctcctgaccag

SEQ ID NO: 7052 - DNA, 25 bp, Homo sapiens
cattctggagaaccgaagctcagct

SEQ ID NO: 7053 - DNA, 25 bp, Homo sapiens
tatcatagtgaaccaaaaccacagc

SEQ ID NO: 7054 - DNA, 25 bp, Homo sapiens
ccccagagaaccacaccactgtctg

SEQ ID NO: 7055 - DNA, 25 bp, Homo sapiens
tccattgaaacgtacacacacccag

SEQ ID NO: 7056 - DNA, 25 bp, Homo sapiens
ctgttgaggcaacgaaccacttcag

SEQ ID NO: 7057 - DNA, 25 bp, Homo sapiens
gttaaaacgtcacaaaggtgctgct

SEQ ID NO: 7058 - DNA, 25 bp, Homo sapiens
gtttaaacgcacgacacccattgaa

SEQ ID NO: 7059 - DNA, 25 bp, Homo sapiens
tcagttgatgaacgagctactcttt

SEQ ID NO: 7060 - DNA, 25 bp, Homo sapiens
aacggcagaacgcacgcttggcgta

SEQ ID NO: 7061 - DNA, 25 bp, Homo sapiens
tccagaccaaccatttcttatagtc

SEQ ID NO: 7062 - DNA, 25 bp, Homo sapiens
cctcctctgaacgtgtgcgtgtgcg

SEQ ID NO: 7063 - DNA, 25 bp, Homo sapiens
tagagcaccaaccacttcaagaaac

SEQ ID NO: 7064 - DNA, 25 bp, Homo sapiens
tttgggcaaccacacagtcatcgac

SEQ ID NO: 7065 - DNA, 25 bp, Homo sapiens
aagatgccacaaccacacctaggga

SEQ ID NO: 7066 - DNA, 25 bp, Homo sapiens
gatagccagcaaccacacttcaaga

SEQ ID NO: 7067 - DNA, 25 bp, Homo sapiens
caagatgccacaaccacacctaggg

SEQ ID NO: 7068 - DNA, 25 bp, Homo sapiens
caaccaacaaccaacacgagtgtgg

SEQ ID NO: 7069 - DNA, 25 bp, Homo sapiens
cagcaacttcaaccaccctatataa

SEQ ID NO: 7070 - DNA, 25 bp, Homo sapiens
tgcctgcaccaaccacatttaggct

SEQ ID NO: 7071 - DNA, 25 bp, Homo sapiens
taagacgcaaccacaggaggaaact

SEQ ID NO: 7072 - DNA, 25 bp, Homo sapiens
gtaacacaaccaccacctctgggag

SEQ ID NO: 7073 - DNA, 25 bp, Homo sapiens
tgcaggacacaaccatcattgggaa

SEQ ID NO: 7074 - DNA, 25 bp, Homo sapiens
gttagtcaacccacacactcattgg

SEQ ID NO: 7075 - DNA, 25 bp, Homo sapiens
tggacacagcaaccaccaaggcatt

SEQ ID NO: 7076 - DNA, 25 bp, Homo sapiens
caggtaacaacgcacacagaggtaa

SEQ ID NO: 7077 - DNA, 25 bp, Homo sapiens
tacacacaaactccaaagcactaag

SEQ ID NO: 7078 - DNA, 25 bp, Homo sapiens
aattcagataactcaccaccacctt

SEQ ID NO: 7079 - DNA, 25 bp, Homo sapiens
gtgtcccaacttttttccatgtgct

SEQ ID NO: 7080 - DNA, 25 bp, Homo sapiens
aacaaaaactgtatccaccaccact

SEQ ID NO: 7081 - DNA, 25 bp, Homo sapiens
tgaagttgaactggtgtgtgtgcca

SEQ ID NO: 7082 - DNA, 25 bp, Homo sapiens
gtagtgacaacttggcggctgctgc

SEQ ID NO: 7083 - DNA, 25 bp, Homo sapiens
aggaacagaacacccaccttagctc

SEQ ID NO: 7084 - DNA, 25 bp, Homo sapiens
tacaatacaactacagtgcaaatca

SEQ ID NO: 7085 - DNA, 25 bp, Homo sapiens
cattgcacgcaaacaacgagttggg

SEQ ID NO: 7086 - DNA, 25 bp, Homo sapiens
ttatttaacaaacacccacacagca

SEQ ID NO: 7087 - DNA, 25 bp, Homo sapiens
taatagtaacagtccacacacacaa

SEQ ID NO: 7088 - DNA, 25 bp, Homo sapiens
tctagagctaacacacataggaagg

SEQ ID NO: 7089 - DNA, 25 bp, Homo sapiens
ttctcacaaacacccgagcttggct

SEQ ID NO: 7090 - DNA, 25 bp, Homo sapiens
gtagtaaacaccaccgcactcagag

SEQ ID NO: 7091 - DNA, 25 bp, Homo sapiens
ttctcacaaacacagcaggtagggt

SEQ ID NO: 7092 - DNA, 25 bp, Homo sapiens
tggtcagcaaacacaccacagggtc

SEQ ID NO: 7093 - DNA, 25 bp, Homo sapiens
gattaataacacgaacacgccaggg

SEQ ID NO: 7094 - DNA, 25 bp, Homo sapiens
tggactcgaacaccactaccagatg

SEQ ID NO: 7095 - DNA, 25 bp, Homo sapiens
tcaccctgcaacacattcagtaagc

SEQ ID NO: 7096 - DNA, 25 bp, Homo sapiens
agtaacaaacagacacacgggatgg

SEQ ID NO: 7097 - DNA, 25 bp, Homo sapiens
cacacgctcatgaacaacaaatgga

SEQ ID NO: 7098 - DNA, 25 bp, Homo sapiens
ttcagtgaaacagagggaatgaaga

SEQ ID NO: 7099 - DNA, 25 bp, Homo sapiens
gacttaaacagcacaacaggctcct

SEQ ID NO: 7100 - DNA, 25 bp, Homo sapiens
gaacaggaacagcaacacacgggca

SEQ ID NO: 7101 - DNA, 25 bp, Homo sapiens
tattacagcaacacaagacacggcg

SEQ ID NO: 7102 - DNA, 25 bp, Homo sapiens
cagtttccaacaacaccgatcttcg

SEQ ID NO: 7103 - DNA, 25 bp, Homo sapiens
ttgagcacagcaacaaaacaatagt

SEQ ID NO: 7104 - DNA, 25 bp, Homo sapiens
tctgaaccaacacacttgtgaaaca

SEQ ID NO: 7105 - DNA, 25 bp, Homo sapiens
ggtgaacaacaacagcaagacagag

SEQ ID NO: 7106 - DNA, 25 bp, Homo sapiens
tcaaggcacaacactccaacctgtg

SEQ ID NO: 7107 - DNA, 25 bp, Homo sapiens
ggtcaccaacactcaggcagggaaa

SEQ ID NO: 7108 - DNA, 25 bp, Homo sapiens
cggactccaacaccgtggccatgaa

SEQ ID NO: 7109 - DNA, 25 bp, Homo sapiens
gctcctggcaacacacatgcagtaa

SEQ ID NO: 7110 - DNA, 25 bp, Homo sapiens
tccacaccaacaggaatggcagggc

SEQ ID NO: 7111 - DNA, 25 bp, Homo sapiens
aaggtccaacacacaaccggagtgg

SEQ ID NO: 7112 - DNA, 25 bp, Homo sapiens
gcattacagcaacaaccgagtgaga

SEQ ID NO: 7113 - DNA, 25 bp, Homo sapiens
tgaggcccaacacaaccagttgcag

SEQ ID NO: 7114 - DNA, 25 bp, Homo sapiens
catacacacaaacattccatacaca

SEQ ID NO: 7115 - DNA, 25 bp, Homo sapiens
agatatgatttaccaccaccaccct

SEQ ID NO: 7116 - DNA, 25 bp, Homo sapiens
ggtgtctgtacccaccaccatcatg

SEQ ID NO: 7117 - DNA, 25 bp, Homo sapiens
tgacaccagtaccaccacatgatag

SEQ ID NO: 7118 - DNA, 25 bp, Homo sapiens
ccagtcacgtaccacacagctatgt

SEQ ID NO: 7119 - DNA, 25 bp, Homo sapiens
tctccgtctaccaccactttgaaaa

SEQ ID NO: 7120 - DNA, 25 bp, Homo sapiens
tagctgtgtgtacgcttgtgtgtgc

SEQ ID NO: 7121 - DNA, 25 bp, Homo sapiens
taatactctacgctaggcatggtgc

SEQ ID NO: 7122 - DNA, 25 bp, Homo sapiens
cagtgctgtactaccaccaccttta

SEQ ID NO: 7123 - DNA, 25 bp, Homo sapiens
atttcgtctaccacacactgtgacc

SEQ ID NO: 7124 - DNA, 25 bp, Homo sapiens
tgtagagatctaccttgcacacacc

SEQ ID NO: 7125 - DNA, 25 bp, Homo sapiens
taaagcttactgagcacacaccatg

SEQ ID NO: 7126 - DNA, 25 bp, Homo sapiens
gtcaccactactaccactgcagggt

SEQ ID NO: 7127 - DNA, 25 bp, Homo sapiens
ggtaccatacgcacacttcatatga

SEQ ID NO: 7128 - DNA, 25 bp, Homo sapiens
gcccagcaatacaccaccacggctt

SEQ ID NO: 7129 - DNA, 25 bp, Homo sapiens
catcaccacacatacctacaaagta

SEQ ID NO: 7130 - DNA, 25 bp, Homo sapiens
gagcagggataccaccacctgttca

SEQ ID NO: 7131 - DNA, 25 bp, Homo sapiens
gacgtcatcatacgcgacaacaccg

SEQ ID NO: 7132 - DNA, 25 bp, Homo sapiens
ctcccggatacgctggctgtgctgg

SEQ ID NO: 7133 - DNA, 25 bp, Homo sapiens
tctgacaggatacgatgggacgctt

SEQ ID NO: 7134 - DNA, 25 bp, Homo sapiens
aagacacacataccttacacacatg

SEQ ID NO: 7135 - DNA, 25 bp, Homo sapiens
tacacacacatacgctgaaaacggg

SEQ ID NO: 7136 - DNA, 25 bp, Homo sapiens
caaacacacatacggtaagctcagt

SEQ ID NO: 7137 - DNA, 25 bp, Homo sapiens
cacacatatgtatacgcacacaagt

SEQ ID NO: 7138 - DNA, 25 bp, Homo sapiens
tacaacttacacacacactacagca

SEQ ID NO: 7139 - DNA, 25 bp, Homo sapiens
cacgcacaagtacacaaagacacag

SEQ ID NO: 7140 - DNA, 25 bp, Homo sapiens
agaactagtacacagccaccaaggc

SEQ ID NO: 7141 - DNA, 25 bp, Homo sapiens
agggtagtacacctcacacatgcac

SEQ ID NO: 7142 - DNA, 25 bp, Homo sapiens
taaccattacacacacagcactgag

SEQ ID NO: 7143 - DNA, 25 bp, Homo sapiens
catcatcattctgtacacacacaag

SEQ ID NO: 7144 - DNA, 25 bp, Homo sapiens
gcctgactctacaacacacctatat

SEQ ID NO: 7145 - DNA, 25 bp, Homo sapiens
catgtgtgtgcagtacagggctgtc

SEQ ID NO: 7146 - DNA, 25 bp, Homo sapiens
tgtgtgtgtctacatactgtgtgtg

SEQ ID NO: 7147 - DNA, 25 bp, Homo sapiens
gatatcccatacaggaagccgccta

SEQ ID NO: 7148 - DNA, 25 bp, Homo sapiens
tagaccaatacaacacacccaaatt

SEQ ID NO: 7149 - DNA, 25 bp, Homo sapiens
gtgtgtgtgtacatagcattcctat

SEQ ID NO: 7150 - DNA, 25 bp, Homo sapiens
taagaagatacacacccacaatgtc

SEQ ID NO: 7151 - DNA, 25 bp, Homo sapiens
ggtggtatacacagcacagaactat

SEQ ID NO: 7152 - DNA, 25 bp, Homo sapiens
acatattccatacacacacattcca

SEQ ID NO: 7153 - DNA, 25 bp, Homo sapiens
taacaggcatacacaaaacccacca

SEQ ID NO: 7154 - DNA, 25 bp, Homo sapiens
gacacaccatacatcatcgctgaag

SEQ ID NO: 7155 - DNA, 25 bp, Homo sapiens
catctctgggatacacagggcacca

SEQ ID NO: 7156 - DNA, 25 bp, Homo sapiens
tgtcacggcatacaccaaacaggat

SEQ ID NO: 7157 - DNA, 25 bp, Homo sapiens
tgcaggtggagaagatattttttag

SEQ ID NO: 7158 - DNA, 25 bp, Homo sapiens
ccactatgggaaaatctgccactgt

SEQ ID NO: 7159 - DNA, 25 bp, Homo sapiens
aatggttggaaacaacacagacagg

SEQ ID NO: 7160 - DNA, 25 bp, Homo sapiens
tactcagcatggaaacaagatgaaa

SEQ ID NO: 7161 - DNA, 25 bp, Homo sapiens
aattagggaactctgtagaacaggc

SEQ ID NO: 7162 - DNA, 25 bp, Homo sapiens
gatgctgatgatggaaacacatgga

SEQ ID NO: 7163 - DNA, 25 bp, Homo sapiens
gccagtgtggaagcacacacagcaa

SEQ ID NO: 7164 - DNA, 25 bp, Homo sapiens
ttttgacgaacacccagcaagcagt

SEQ ID NO: 7165 - DNA, 25 bp, Homo sapiens
ggtagcacgaacaccaccgcagaca

SEQ ID NO: 7166 - DNA, 25 bp, Homo sapiens
agcacacgccgaacgggaagacgcg

SEQ ID NO: 7167 - DNA, 25 bp, Homo sapiens
ggaacacgaaccacacatccgtgtg

SEQ ID NO: 7168 - DNA, 25 bp, Homo sapiens
agagatgagccgaacacacacagtc

SEQ ID NO: 7169 - DNA, 25 bp, Homo sapiens
tcactccatgcgaacacatcctaga

SEQ ID NO: 7170 - DNA, 25 bp, Homo sapiens
attcacacacgaactcactcattca

SEQ ID NO: 7171 - DNA, 25 bp, Homo sapiens
ttttgatggaataggagccgccact

SEQ ID NO: 7172 - DNA, 25 bp, Homo sapiens
tggcgagcggaatggaatacacatc

SEQ ID NO: 7173 - DNA, 25 bp, Homo sapiens
tcaggcataggaatgaagggcaccc

SEQ ID NO: 7174 - DNA, 25 bp, Homo sapiens
gatcaccaagaacaccaagaacagg

SEQ ID NO: 7175 - DNA, 25 bp, Homo sapiens
gtttaagaaacacccagccacagct

SEQ ID NO: 7176 - DNA, 25 bp, Homo sapiens
cttttggagaacacacacccctgac

SEQ ID NO: 7177 - DNA, 25 bp, Homo sapiens
ctaatggcaagaacaacaactactt

SEQ ID NO: 7178 - DNA, 25 bp, Homo sapiens
tgctcagagaagaacacacacggct

SEQ ID NO: 7179 - DNA, 25 bp, Homo sapiens
ttgtgttcagaaacccaggcccaac

SEQ ID NO: 7180 - DNA, 25 bp, Homo sapiens
gactggctagaagcaaactgttatc

SEQ ID NO: 7181 - DNA, 25 bp, Homo sapiens
cagagcgggagaagacctcaggtac

SEQ ID NO: 7182 - DNA, 25 bp, Homo sapiens
ttttgagagaagcacacctcactca

SEQ ID NO: 7183 - DNA, 25 bp, Homo sapiens
ggaaacagaacagcccataccaaga

SEQ ID NO: 7184 - DNA, 25 bp, Homo sapiens
cacacacagatcagaacaaggcggg

SEQ ID NO: 7185 - DNA, 25 bp, Homo sapiens
gatggaaagaatccacaacacgcct

SEQ ID NO: 7186 - DNA, 25 bp, Homo sapiens
attttttgaacaccacgaatctgtg

SEQ ID NO: 7187 - DNA, 25 bp, Homo sapiens
atggtgtgtgtgaaactcaaattta

SEQ ID NO: 7188 - DNA, 25 bp, Homo sapiens
gcagtggtgctgaagctatagccaa

SEQ ID NO: 7189 - DNA, 25 bp, Homo sapiens
ccagcacgcactgaactcaattttg

SEQ ID NO: 7190 - DNA, 25 bp, Homo sapiens
gacaatactgaagacacacaaacct

SEQ ID NO: 7191 - DNA, 25 bp, Homo sapiens
cagcttggcttgaatcgcttccaga

SEQ ID NO: 7192 - DNA, 25 bp, Homo sapiens
atcagcacgcatatgaactatgaaa

SEQ ID NO: 7193 - DNA, 25 bp, Homo sapiens
tggcttaggaccacccagccgtggg

SEQ ID NO: 7194 - DNA, 25 bp, Homo sapiens
cggccgcggacggagattacgtcac

SEQ ID NO: 7195 - DNA, 25 bp, Homo sapiens
gagtgaagcgaccacgcacctgctt

SEQ ID NO: 7196 - DNA, 25 bp, Homo sapiens
aaacacggaccacagagcgtaatct

SEQ ID NO: 7197 - DNA, 25 bp, Homo sapiens
gtttccgaccagacacagtcactga

SEQ ID NO: 7198 - DNA, 25 bp, Homo sapiens
ttgcccagcgaccaactgtgaccat

SEQ ID NO: 7199 - DNA, 25 bp, Homo sapiens
ggaggtcgacccacgccacacgtcg

SEQ ID NO: 7200 - DNA, 25 bp, Homo sapiens
agactcacacgaccacctcagatga

SEQ ID NO: 7201 - DNA, 25 bp, Homo sapiens
gtgagacacgaccacacaacaggca

SEQ ID NO: 7202 - DNA, 25 bp, Homo sapiens
gcacaccgcgaccagcacgcggtcg

SEQ ID NO: 7203 - DNA, 25 bp, Homo sapiens
gcgcacactggacgcacacgggacg

SEQ ID NO: 7204 - DNA, 25 bp, Homo sapiens
tatataacgactacggcacacacgc

SEQ ID NO: 7205 - DNA, 25 bp, Homo sapiens
aagtgggagacgtttggctagcacc

SEQ ID NO: 7206 - DNA, 25 bp, Homo sapiens
gaaatcaagaccaaaccacacggtg

SEQ ID NO: 7207 - DNA, 25 bp, Homo sapiens
aggttgaagacgcacacagctgagg

SEQ ID NO: 7208 - DNA, 25 bp, Homo sapiens
gacgatgcaagacggtggacctgct

SEQ ID NO: 7209 - DNA, 25 bp, Homo sapiens
agcacaccgagacgctccatcaggg

SEQ ID NO: 7210 - DNA, 25 bp, Homo sapiens
catcggacacagacgccttagggat

SEQ ID NO: 7211 - DNA, 25 bp, Homo sapiens
tgtctccacagaccaccatggcata

SEQ ID NO: 7212 - DNA, 25 bp, Homo sapiens
agcggatccagacgcgcacaccagg

SEQ ID NO: 7213 - DNA, 25 bp, Homo sapiens
cctctgggagactgggactttgtct

SEQ ID NO: 7214 - DNA, 25 bp, Homo sapiens
gagtccaggacaccgccttggatgg

SEQ ID NO: 7215 - DNA, 25 bp, Homo sapiens
gaagccggacacacacttattgcag

SEQ ID NO: 7216 - DNA, 25 bp, Homo sapiens
ttcaagacgacaccaccaaatgtgg

SEQ ID NO: 7217 - DNA, 25 bp, Homo sapiens
tgacaaaggacaccaccaagaggag

SEQ ID NO: 7218 - DNA, 25 bp, Homo sapiens
cacacacgggacaaagctcttccag

SEQ ID NO: 7219 - DNA, 25 bp, Homo sapiens
tccacacggacacgtagatgatgac

SEQ ID NO: 7220 - DNA, 25 bp, Homo sapiens
tagcacacggacacgatatggacgg

SEQ ID NO: 7221 - DNA, 25 bp, Homo sapiens
tcagggctggacacacacagcttcc

SEQ ID NO: 7222 - DNA, 25 bp, Homo sapiens
tccatgatcaggacactcacacgca

SEQ ID NO: 7223 - DNA, 25 bp, Homo sapiens
agcacacagggacacagcaactaga

SEQ ID NO: 7224 - DNA, 25 bp, Homo sapiens
ggaaaggacacacagtcccagggca

SEQ ID NO: 7225 - DNA, 25 bp, Homo sapiens
cagaaccggacacaaccagctgtga

SEQ ID NO: 7226 - DNA, 25 bp, Homo sapiens
caccaccacagacacgagggaggtc

SEQ ID NO: 7227 - DNA, 25 bp, Homo sapiens
taacatatagacaaacgcacaccgg

SEQ ID NO: 7228 - DNA, 25 bp, Homo sapiens
cgggaccgacacagacgcggacagc

SEQ ID NO: 7229 - DNA, 25 bp, Homo sapiens
aaagtagcagacaacacactccagg

SEQ ID NO: 7230 - DNA, 25 bp, Homo sapiens
tgtaagtcagacacaccacttaggg

SEQ ID NO: 7231 - DNA, 25 bp, Homo sapiens
tcgtctaagacacgacacactggct

SEQ ID NO: 7232 - DNA, 25 bp, Homo sapiens
tctgggatgagacacacacgggttg

SEQ ID NO: 7233 - DNA, 25 bp, Homo sapiens
gtaacagagacaccacatagcagtg

SEQ ID NO: 7234 - DNA, 25 bp, Homo sapiens
gagtcacacagacaagaccaaggag

SEQ ID NO: 7235 - DNA, 25 bp, Homo sapiens
tgctcgccacagacacaattcaagt

SEQ ID NO: 7236 - DNA, 25 bp, Homo sapiens
cagcgcgcaggagacacactcacgg

SEQ ID NO: 7237 - DNA, 25 bp, Homo sapiens
tcacagctgatagacagcgaagcct

SEQ ID NO: 7238 - DNA, 25 bp, Homo sapiens
ttgtcgaagacagccacagcacagt

SEQ ID NO: 7239 - DNA, 25 bp, Homo sapiens
tatttacagacacgcccactgtggg

SEQ ID NO: 7240 - DNA, 25 bp, Homo sapiens
gcagtggccagacacacctgttggg

SEQ ID NO: 7241 - DNA, 25 bp, Homo sapiens
tacccacagacacacggcgagtggt

SEQ ID NO: 7242 - DNA, 25 bp, Homo sapiens
tgttcagcacagacaccacggagtc

SEQ ID NO: 7243 - DNA, 25 bp, Homo sapiens
caggatctattgaccacacacttaa

SEQ ID NO: 7244 - DNA, 25 bp, Homo sapiens
gaagtattgacacaccaaccccgtg

SEQ ID NO: 7245 - DNA, 25 bp, Homo sapiens
tacatgcaagtgacaccacacttac

SEQ ID NO: 7246 - DNA, 25 bp, Homo sapiens
gccaacactgacaccaaatttttga

SEQ ID NO: 7247 - DNA, 25 bp, Homo sapiens
cttgtaactgacacacacatcaagg

SEQ ID NO: 7248 - DNA, 25 bp, Homo sapiens
tcaaacacgcacgtgaacacccagt

SEQ ID NO: 7249 - DNA, 25 bp, Homo sapiens
tgaaagtaagggcaaaaatcgcaat

SEQ ID NO: 7250 - DNA, 25 bp, Homo sapiens
tccactcaaaggacgcacacaggtg

SEQ ID NO: 7251 - DNA, 25 bp, Homo sapiens
aattataaaggaagccaccaccagg

SEQ ID NO: 7252 - DNA, 25 bp, Homo sapiens
tgaaaaaaggcttctcacacccacg

SEQ ID NO: 7253 - DNA, 25 bp, Homo sapiens
aggagacgaaggagccatgatgact

SEQ ID NO: 7254 - DNA, 25 bp, Homo sapiens
gcttcaggaaggacacacacagagt

SEQ ID NO: 7255 - DNA, 25 bp, Homo sapiens
ccaggatggcaagggctctcctgaa

SEQ ID NO: 7256 - DNA, 25 bp, Homo sapiens
tgatcacacacaaggagttctttcc

SEQ ID NO: 7257 - DNA, 25 bp, Homo sapiens
aggctggagcaaggagcaggtcgtc

SEQ ID NO: 7258 - DNA, 25 bp, Homo sapiens
gggaataagtccacacacaacggtg

SEQ ID NO: 7259 - DNA, 25 bp, Homo sapiens
tggtgtccaagttccgtcaaagatc

SEQ ID NO: 7260 - DNA, 25 bp, Homo sapiens
ggaaaaagacagacgcacagctggg

SEQ ID NO: 7261 - DNA, 25 bp, Homo sapiens
tgctgttggaagacacacatcatga

SEQ ID NO: 7262 - DNA, 25 bp, Homo sapiens
tgagcgcagtaagacaacaacaaaa

SEQ ID NO: 7263 - DNA, 25 bp, Homo sapiens
tggttcagaagacaaaaactccttc

SEQ ID NO: 7264 - DNA, 25 bp, Homo sapiens
gactgaaaagagcaggcacacatgg

SEQ ID NO: 7265 - DNA, 25 bp, Homo sapiens
ctgcggctggaagagagagggcgtc

SEQ ID NO: 7266 - DNA, 25 bp, Homo sapiens
tcacgcacagcaagacgcaaaacgt

SEQ ID NO: 7267 - DNA, 25 bp, Homo sapiens
agggagacaagacacgcacggagcc

SEQ ID NO: 7268 - DNA, 25 bp, Homo sapiens
aagctgtgctgaagataaaactaga

SEQ ID NO: 7269 - DNA, 25 bp, Homo sapiens
gctcatctgttaggctaagtcccag

SEQ ID NO: 7270 - DNA, 25 bp, Homo sapiens
tgcggcggaatacgttccaaattag

SEQ ID NO: 7271 - DNA, 25 bp, Homo sapiens
gattttgtaggtgcgtgtgctgcca

SEQ ID NO: 7272 - DNA, 25 bp, Homo sapiens
gaccaattagctgcaaacaccaccg

SEQ ID NO: 7273 - DNA, 25 bp, Homo sapiens
gatactgctgctaggcttcaaagga

SEQ ID NO: 7274 - DNA, 25 bp, Homo sapiens
ggctgctggtagtcctgctctcagg

SEQ ID NO: 7275 - DNA, 25 bp, Homo sapiens
tacttaataggagagacaggcctgc

SEQ ID NO: 7276 - DNA, 25 bp, Homo sapiens
gctgcccttagaaagcacacactca

SEQ ID NO: 7277 - DNA, 25 bp, Homo sapiens
ccttatagtagacacacggcacctc

SEQ ID NO: 7278 - DNA, 25 bp, Homo sapiens
tacatttgtagattttttccccaga

SEQ ID NO: 7279 - DNA, 25 bp, Homo sapiens
cacacaggcagtagaaaggcactct

SEQ ID NO: 7280 - DNA, 25 bp, Homo sapiens
tgccaggtctagaaacacacacgtg

SEQ ID NO: 7281 - DNA, 25 bp, Homo sapiens
caagggtgatagatgagggtcatca

SEQ ID NO: 7282 - DNA, 25 bp, Homo sapiens
aacactgagcatagacatagcctct

SEQ ID NO: 7283 - DNA, 25 bp, Homo sapiens
cataaataaagcgaacacaccaagg

SEQ ID NO: 7284 - DNA, 25 bp, Homo sapiens
gacatgcagctcatagacgcacgca

SEQ ID NO: 7285 - DNA, 25 bp, Homo sapiens
agtcacagcacaagccaccaccgaa

SEQ ID NO: 7286 - DNA, 25 bp, Homo sapiens
ccaaagctaagctggctgggtacca

SEQ ID NO: 7287 - DNA, 25 bp, Homo sapiens
gttagaaagccaacgcacacaggga

SEQ ID NO: 7288 - DNA, 25 bp, Homo sapiens
ataaataaagcgaacacaccaagga

SEQ ID NO: 7289 - DNA, 25 bp, Homo sapiens
gagtgtaaagcaacacacccagggc

SEQ ID NO: 7290 - DNA, 25 bp, Homo sapiens
ctcacacctaagcataaaaacctaa

SEQ ID NO: 7291 - DNA, 25 bp, Homo sapiens
taatatctcaagcacaagcacagca

SEQ ID NO: 7292 - DNA, 25 bp, Homo sapiens
atgcacatatatgcaagcacacaca

SEQ ID NO: 7293 - DNA, 25 bp, Homo sapiens
caaaagtgtagcttggcttggcagc

SEQ ID NO: 7294 - DNA, 25 bp, Homo sapiens
gaattgtatagccagacacagccac

SEQ ID NO: 7295 - DNA, 25 bp, Homo sapiens
tattacgatagccactcacacggcg

SEQ ID NO: 7296 - DNA, 25 bp, Homo sapiens
atctccaagtagcaccacacggtag

SEQ ID NO: 7297 - DNA, 25 bp, Homo sapiens
cattttttagcaagcagacggccac

SEQ ID NO: 7298 - DNA, 25 bp, Homo sapiens
gcaaagcagcatagcaacaatcgtg

SEQ ID NO: 7299 - DNA, 25 bp, Homo sapiens
acagcagccctagcatacagatacg

SEQ ID NO: 7300 - DNA, 25 bp, Homo sapiens
gaagagcctagcacacacagtcagt

SEQ ID NO: 7301 - DNA, 25 bp, Homo sapiens
aagggaggaggagcaaattattgat

SEQ ID NO: 7302 - DNA, 25 bp, Homo sapiens
gagtgctgaggaggaactttcccct

SEQ ID NO: 7303 - DNA, 25 bp, Homo sapiens
ctatatagcaggagggctgctgcgt

SEQ ID NO: 7304 - DNA, 25 bp, Homo sapiens
ccctagggaggatggatgcactgcc

SEQ ID NO: 7305 - DNA, 25 bp, Homo sapiens
ccaacaatcgagtctccaacagcaa

SEQ ID NO: 7306 - DNA, 25 bp, Homo sapiens
ctgcgacggcagagggacgtcacca

SEQ ID NO: 7307 - DNA, 25 bp, Homo sapiens
ggccgtggagtgtccccttccagca

SEQ ID NO: 7308 - DNA, 25 bp, Homo sapiens
tggaggaggagtgagcaggtcccaa

SEQ ID NO: 7309 - DNA, 25 bp, Homo sapiens
taaacaagaggctaatctgacaaaa

SEQ ID NO: 7310 - DNA, 25 bp, Homo sapiens
gaagaggagagggacacacacacac

SEQ ID NO: 7311 - DNA, 25 bp, Homo sapiens
tagggccagaggtctgtctgccaga

SEQ ID NO: 7312 - DNA, 25 bp, Homo sapiens
tagtatgaagagtgtgcgtgcccaa

SEQ ID NO: 7313 - DNA, 25 bp, Homo sapiens
gcacgcacacagaggactggcatct

SEQ ID NO: 7314 - DNA, 25 bp, Homo sapiens
gccaggagcagagtaacagtcaaaa

SEQ ID NO: 7315 - DNA, 25 bp, Homo sapiens
tctcccggagaagccggagttgtca

SEQ ID NO: 7316 - DNA, 25 bp, Homo sapiens
ccttttggagaacacacacccctga

SEQ ID NO: 7317 - DNA, 25 bp, Homo sapiens
ctggcggaggagaatcagtcatccc

SEQ ID NO: 7318 - DNA, 25 bp, Homo sapiens
gaatggaggagagtaggaaattccc

SEQ ID NO: 7319 - DNA, 25 bp, Homo sapiens
cacaccacagcagagtgtaactaaa

SEQ ID NO: 7320 - DNA, 25 bp, Homo sapiens
tgctgagcagtggagaaacacaact

SEQ ID NO: 7321 - DNA, 25 bp, Homo sapiens
gaaggaggagaggtacaattctctg

SEQ ID NO: 7322 - DNA, 25 bp, Homo sapiens
tttcctggagaccaatcagcagcct

SEQ ID NO: 7323 - DNA, 25 bp, Homo sapiens
ctagtggaggagaggaggcatgggc

SEQ ID NO: 7324 - DNA, 25 bp, Homo sapiens
tattgctgtggagagataaagacga

SEQ ID NO: 7325 - DNA, 25 bp, Homo sapiens
tgtggcaggagagacttcctcccag

SEQ ID NO: 7326 - DNA, 25 bp, Homo sapiens
aaaggagcagagaagctttggatcc

SEQ ID NO: 7327 - DNA, 25 bp, Homo sapiens
tgtattatagagacacacacgcctt

SEQ ID NO: 7328 - DNA, 25 bp, Homo sapiens
catcacacgcacagagagcttggaa

SEQ ID NO: 7329 - DNA, 25 bp, Homo sapiens
taggctgtgtgagggtctccagtcc

SEQ ID NO: 7330 - DNA, 25 bp, Homo sapiens
tcttacacatgaggtgaaaccccaa

SEQ ID NO: 7331 - DNA, 25 bp, Homo sapiens
cacacacacatctgagggccttggt

SEQ ID NO: 7332 - DNA, 25 bp, Homo sapiens
tagtgtgtgtgagtgttttcccagg

SEQ ID NO: 7333 - DNA, 25 bp, Homo sapiens
ccttcacagtgagtgctacagttca

SEQ ID NO: 7334 - DNA, 25 bp, Homo sapiens
accagggctgaggaagaccacgttc

SEQ ID NO: 7335 - DNA, 25 bp, Homo sapiens
ccacatgtggtgagtgccgggtaca

SEQ ID NO: 7336 - DNA, 25 bp, Homo sapiens
gaatacatgtgagtgagtgcagcac

SEQ ID NO: 7337 - DNA, 25 bp, Homo sapiens
tcttgggctgagagacgctatagtg

SEQ ID NO: 7338 - DNA, 25 bp, Homo sapiens
tctgcagggctgagaaggtgaaccc

SEQ ID NO: 7339 - DNA, 25 bp, Homo sapiens
aaaagcactgagaaagccaaacata

SEQ ID NO: 7340 - DNA, 25 bp, Homo sapiens
taaaagtgagaacacacaacacagc

SEQ ID NO: 7341 - DNA, 25 bp, Homo sapiens
caggcgtgctgtgagagctcttttc

SEQ ID NO: 7342 - DNA, 25 bp, Homo sapiens
tgaggaaggagcatattccaaactc

SEQ ID NO: 7343 - DNA, 25 bp, Homo sapiens
ggccagacgagcacacacagttgtt

SEQ ID NO: 7344 - DNA, 25 bp, Homo sapiens
gcagtagcaggagcgctcagtctac

SEQ ID NO: 7345 - DNA, 25 bp, Homo sapiens
tactgctgcaggagctgttgctgga

SEQ ID NO: 7346 - DNA, 25 bp, Homo sapiens
cagaccaagcagagctctcagggag

SEQ ID NO: 7347 - DNA, 25 bp, Homo sapiens
gcggagacgagcacgctcacgcacg

SEQ ID NO: 7348 - DNA, 25 bp, Homo sapiens
gagcggcggagcattcacagtgaaa

SEQ ID NO: 7349 - DNA, 25 bp, Homo sapiens
gatcacaagcagagccaaggttcat

SEQ ID NO: 7350 - DNA, 25 bp, Homo sapiens
tgagcggcggagcattcacagtgaa

SEQ ID NO: 7351 - DNA, 25 bp, Homo sapiens
aggtggcaggagcatcttctgagaa

SEQ ID NO: 7352 - DNA, 25 bp, Homo sapiens
gtgtgcgggagcacgtacacacaca

SEQ ID NO: 7353 - DNA, 25 bp, Homo sapiens
cagggtaggagcacatgatgcatcc

SEQ ID NO: 7354 - DNA, 25 bp, Homo sapiens
cagctgagcagggagcaggctccca

SEQ ID NO: 7355 - DNA, 25 bp, Homo sapiens
aatgtggtgtgagcatatcccctac

SEQ ID NO: 7356 - DNA, 25 bp, Homo sapiens
cacacacacgagagcatgaagcaca

SEQ ID NO: 7357 - DNA, 25 bp, Homo sapiens
ggtgtgtgcatgagcgtggacccgg

SEQ ID NO: 7358 - DNA, 25 bp, Homo sapiens
gaaacacagagcacactgagagctt

SEQ ID NO: 7359 - DNA, 25 bp, Homo sapiens
acgccgcgacacgagcacatcgggt

SEQ ID NO: 7360 - DNA, 25 bp, Homo sapiens
ctggtagttgagcacacacatcaca

SEQ ID NO: 7361 - DNA, 25 bp, Homo sapiens
cctggacggcagtaaggagtcactc

SEQ ID NO: 7362 - DNA, 25 bp, Homo sapiens
caccaccaccaagggattgcaaagg

SEQ ID NO: 7363 - DNA, 25 bp, Homo sapiens
ggaatattgagcacccacacagagg

SEQ ID NO: 7364 - DNA, 25 bp, Homo sapiens
tctcacaaccaaacttacctcatat

SEQ ID NO: 7365 - DNA, 25 bp, Homo sapiens
tgcaaacaccaacaaacgggcttag

SEQ ID NO: 7366 - DNA, 25 bp, Homo sapiens
tgtaccaccaaacacggagggacat

SEQ ID NO: 7367 - DNA, 25 bp, Homo sapiens
ttctcagaccaaccagacttctttt

SEQ ID NO: 7368 - DNA, 25 bp, Homo sapiens
taacaaccaaccacgaatgggaggc

SEQ ID NO: 7369 - DNA, 25 bp, Homo sapiens
gtcaataccaaattcacacaccttt

SEQ ID NO: 7370 - DNA, 25 bp, Homo sapiens
agcacatacaccaaagcaggcaatg

SEQ ID NO: 7371 - DNA, 25 bp, Homo sapiens
tgcatcaccaccaaccggatggagg

SEQ ID NO: 7372 - DNA, 25 bp, Homo sapiens
ttggcaaccaacacgcccgcagtgt

SEQ ID NO: 7373 - DNA, 25 bp, Homo sapiens
caatcccagccaaacaagcaatttt

SEQ ID NO: 7374 - DNA, 25 bp, Homo sapiens
tgccaacaccaacatgaatcaggag

SEQ ID NO: 7375 - DNA, 25 bp, Homo sapiens
tcccaacacaagcacggcaggaagt

SEQ ID NO: 7376 - DNA, 25 bp, Homo sapiens
tcacacacccaagcaggtaagcacg

SEQ ID NO: 7377 - DNA, 25 bp, Homo sapiens
ggccacaccaagagcttcggaaacg

SEQ ID NO: 7378 - DNA, 25 bp, Homo sapiens
tctggcgaccaagcacaaactgact

SEQ ID NO: 7379 - DNA, 25 bp, Homo sapiens
tggtgagcaccaagcacaaggcatc

SEQ ID NO: 7380 - DNA, 25 bp, Homo sapiens
ttcacatcaccaagcacaaagctgg

SEQ ID NO: 7381 - DNA, 25 bp, Homo sapiens
aacacagcccaatacctaatgatac

SEQ ID NO: 7382 - DNA, 25 bp, Homo sapiens
tatgtacagccaagccaactcagtc

SEQ ID NO: 7383 - DNA, 25 bp, Homo sapiens
tatagaatacaacaccaacgtcgca

SEQ ID NO: 7384 - DNA, 25 bp, Homo sapiens
ccagaaacacaagctaaatatttta

SEQ ID NO: 7385 - DNA, 25 bp, Homo sapiens
tgtgagtcaacaaacaacaacctct

SEQ ID NO: 7386 - DNA, 25 bp, Homo sapiens
gatgctccaacaaccacattcacag

SEQ ID NO: 7387 - DNA, 25 bp, Homo sapiens
agagtcagcaacaacaattcggtag

SEQ ID NO: 7388 - DNA, 25 bp, Homo sapiens
gtagctcaacaaaaacacacgaacg

SEQ ID NO: 7389 - DNA, 25 bp, Homo sapiens
aaagtcaacaaagccaccagcaaaa

SEQ ID NO: 7390 - DNA, 25 bp, Homo sapiens
gcaacaaacaactcacgaatcaggc

SEQ ID NO: 7391 - DNA, 25 bp, Homo sapiens
tcatccatgcaacaaacagctattg

SEQ ID NO: 7392 - DNA, 25 bp, Homo sapiens
gtgtagcaacaacagcccaaaccct

SEQ ID NO: 7393 - DNA, 25 bp, Homo sapiens
cactggccacacaactgagtcggaa

SEQ ID NO: 7394 - DNA, 25 bp, Homo sapiens
tcaaggtacaaccacacaaagaggg

SEQ ID NO: 7395 - DNA, 25 bp, Homo sapiens
tccagacgacaacagacctagctaa

SEQ ID NO: 7396 - DNA, 25 bp, Homo sapiens
gcctacaacaacagcatcaagcgtg

SEQ ID NO: 7397 - DNA, 25 bp, Homo sapiens
gtcccagacaacaatcccaagaaag

SEQ ID NO: 7398 - DNA, 25 bp, Homo sapiens
aagccacatgacaaacctataaaga

SEQ ID NO: 7399 - DNA, 25 bp, Homo sapiens
gtacatagacaacaccactaatttg

SEQ ID NO: 7400 - DNA, 25 bp, Homo sapiens
ggatggcgacaaacacacactgaac

SEQ ID NO: 7401 - DNA, 25 bp, Homo sapiens
aagtagcagacaacacactccagga

SEQ ID NO: 7402 - DNA, 25 bp, Homo sapiens
ttaaagacaacaccaccaggttgaa

SEQ ID NO: 7403 - DNA, 25 bp, Homo sapiens
gactgacacacaaagggacttggcc

SEQ ID NO: 7404 - DNA, 25 bp, Homo sapiens
agtccaacacaaacaagaacttcag

SEQ ID NO: 7405 - DNA, 25 bp, Homo sapiens
tgcagccagctacaaggaaagaggt

SEQ ID NO: 7406 - DNA, 25 bp, Homo sapiens
aagctgaccacaacagccactacga

SEQ ID NO: 7407 - DNA, 25 bp, Homo sapiens
tccacagccacaatcaaagccaagg

SEQ ID NO: 7408 - DNA, 25 bp, Homo sapiens
aacaccacacaacctacatgctgga

SEQ ID NO: 7409 - DNA, 25 bp, Homo sapiens
tcgagaccacaacccagaatcctgg

SEQ ID NO: 7410 - DNA, 25 bp, Homo sapiens
cagactgacacacaaagggacttgg

SEQ ID NO: 7411 - DNA, 25 bp, Homo sapiens
aatattccacaaatgccacaaagaa

SEQ ID NO: 7412 - DNA, 25 bp, Homo sapiens
tctcactcacacaagaatgagaaaa

SEQ ID NO: 7413 - DNA, 25 bp, Homo sapiens
tccccagacaagcaccacatgtggg

SEQ ID NO: 7414 - DNA, 25 bp, Homo sapiens
gaaacacacaaagctcgggcagaga

SEQ ID NO: 7415 - DNA, 25 bp, Homo sapiens
tcgtcacacacaaacacggtgcggg

SEQ ID NO: 7416 - DNA, 25 bp, Homo sapiens
aggagcgcacacaaccagacggtgg

SEQ ID NO: 7417 - DNA, 25 bp, Homo sapiens
caacacagtcacaaatgccttcatt

SEQ ID NO: 7418 - DNA, 25 bp, Homo sapiens
ctggacagcacacaacctatcctga

SEQ ID NO: 7419 - DNA, 25 bp, Homo sapiens
gaaaacacaacacagacagacgcaa

SEQ ID NO: 7420 - DNA, 25 bp, Homo sapiens
gtgactcacacaacccagcacttgg

SEQ ID NO: 7421 - DNA, 25 bp, Homo sapiens
gacattacacaaccacagcacttgc

SEQ ID NO: 7422 - DNA, 25 bp, Homo sapiens
aggtaacacaagcacgacgcgatca

SEQ ID NO: 7423 - DNA, 25 bp, Homo sapiens
agaaggacacaagaacacggagcac

SEQ ID NO: 7424 - DNA, 25 bp, Homo sapiens
ggcactcacacaaccacatgttaga

SEQ ID NO: 7425 - DNA, 25 bp, Homo sapiens
tttaacacaaggcacacacgagggt

SEQ ID NO: 7426 - DNA, 25 bp, Homo sapiens
ctcgccagacacaatcccaggagat

SEQ ID NO: 7427 - DNA, 25 bp, Homo sapiens
aactcattcacacaacccaacttat

SEQ ID NO: 7428 - DNA, 25 bp, Homo sapiens
gccgtgtgacaatccagtacaaggg

SEQ ID NO: 7429 - DNA, 25 bp, Homo sapiens
gaaagttcaaacacaaacgcactgc

SEQ ID NO: 7430 - DNA, 25 bp, Homo sapiens
ttacagagtcaaccagcccattggg

SEQ ID NO: 7431 - DNA, 25 bp, Homo sapiens
gacacacctcaaacaagtgtgaaag

SEQ ID NO: 7432 - DNA, 25 bp, Homo sapiens
cgacttggctcaacaaactgcatta

SEQ ID NO: 7433 - DNA, 25 bp, Homo sapiens
cagctgttgcaatcaaggccatggc

SEQ ID NO: 7434 - DNA, 25 bp, Homo sapiens
gttaaatcaaccaccactaccactg

SEQ ID NO: 7435 - DNA, 25 bp, Homo sapiens
gatcatctcctcaatgctagtgggt

SEQ ID NO: 7436 - DNA, 25 bp, Homo sapiens
ggatgaggcatcaacacaccccatc

SEQ ID NO: 7437 - DNA, 25 bp, Homo sapiens
tccacaaatcaagcacacaagcagg

SEQ ID NO: 7438 - DNA, 25 bp, Homo sapiens
aagctggcccaccaatgacccgggt

SEQ ID NO: 7439 - DNA, 25 bp, Homo sapiens
cacaagccaccaccgaaagttctga

SEQ ID NO: 7440 - DNA, 25 bp, Homo sapiens
tcagaacccaccaccaatgtaagat

SEQ ID NO: 7441 - DNA, 25 bp, Homo sapiens
tggccaaccacccagatgaagcaaa

SEQ ID NO: 7442 - DNA, 25 bp, Homo sapiens
caataagcacacaccagttttttcc

SEQ ID NO: 7443 - DNA, 25 bp, Homo sapiens
tcgaggaccaccacacgaatgggaa

SEQ ID NO: 7444 - DNA, 25 bp, Homo sapiens
gccggcaccaccagaagtcaggaaa

SEQ ID NO: 7445 - DNA, 25 bp, Homo sapiens
tcccaaccacctgaaactgaagaat

SEQ ID NO: 7446 - DNA, 25 bp, Homo sapiens
taaacaccaccgcactatgattagc

SEQ ID NO: 7447 - DNA, 25 bp, Homo sapiens
catttacccacaccacggaaggtgg

SEQ ID NO: 7448 - DNA, 25 bp, Homo sapiens
tggtaaccaccacacgagtgcagca

SEQ ID NO: 7449 - DNA, 25 bp, Homo sapiens
taccatcaccacctgaaatatcctt

SEQ ID NO: 7450 - DNA, 25 bp, Homo sapiens
catgaaccaccaccgaaaacttctt

SEQ ID NO: 7451 - DNA, 25 bp, Homo sapiens
tagaagctccaccacaaacatgtcg

SEQ ID NO: 7452 - DNA, 25 bp, Homo sapiens
gatcaccaccaccttaaagggcaag

SEQ ID NO: 7453 - DNA, 25 bp, Homo sapiens
tatatatcaccaccacgcatcatag

SEQ ID NO: 7454 - DNA, 25 bp, Homo sapiens
taggccaccaccatagtcagggaag

SEQ ID NO: 7455 - DNA, 25 bp, Homo sapiens
tgaagtcaccaccactgagacctgt

SEQ ID NO: 7456 - DNA, 25 bp, Homo sapiens
gaaaatgccaccatcaccatacttc

SEQ ID NO: 7457 - DNA, 25 bp, Homo sapiens
acaaccaccacggtcactcagagca

SEQ ID NO: 7458 - DNA, 25 bp, Homo sapiens
tcaaccaccaccattaggatgtgag

SEQ ID NO: 7459 - DNA, 25 bp, Homo sapiens
tgataatgcaccaccatcagaccag

SEQ ID NO: 7460 - DNA, 25 bp, Homo sapiens
tgtaacaccaccactcctgcagttg

SEQ ID NO: 7461 - DNA, 25 bp, Homo sapiens
gtgccacaccaccagctgttctgtt

SEQ ID NO: 7462 - DNA, 25 bp, Homo sapiens
tggacacgccaccagcctgtctgaa

SEQ ID NO: 7463 - DNA, 25 bp, Homo sapiens
tgcatatccaccaccatagagctca

SEQ ID NO: 7464 - DNA, 25 bp, Homo sapiens
atggctctcagccaccacaaaatgg

SEQ ID NO: 7465 - DNA, 25 bp, Homo sapiens
gtgagaagccaccacggcagacaat

SEQ ID NO: 7466 - DNA, 25 bp, Homo sapiens
aaatatctgccacgccacgcgttca

SEQ ID NO: 7467 - DNA, 25 bp, Homo sapiens
tagcaccaccacgggcagagccagg

SEQ ID NO: 7468 - DNA, 25 bp, Homo sapiens
gatagacagccaccaagcactgaag

SEQ ID NO: 7469 - DNA, 25 bp, Homo sapiens
ccacacaaccacgtgatcatcaatt

SEQ ID NO: 7470 - DNA, 25 bp, Homo sapiens
tcatcccagccacgcactatgagaa

SEQ ID NO: 7471 - DNA, 25 bp, Homo sapiens
ctttgcgcagacaccttactaatct

SEQ ID NO: 7472 - DNA, 25 bp, Homo sapiens
gtcacacaccactaggtccgcaggg

SEQ ID NO: 7473 - DNA, 25 bp, Homo sapiens
tacaccaccactcctgtgtagagaa

SEQ ID NO: 7474 - DNA, 25 bp, Homo sapiens
ctctcctcacacaccagacagctca

SEQ ID NO: 7475 - DNA, 25 bp, Homo sapiens
taggtgaccactgtagaagcctgga

SEQ ID NO: 7476 - DNA, 25 bp, Homo sapiens
tgtagcaggacaccaaaaccgtatt

SEQ ID NO: 7477 - DNA, 25 bp, Homo sapiens
gacaccaggcacgtccatggtaata

SEQ ID NO: 7478 - DNA, 25 bp, Homo sapiens
aaggcaatacacaccaaccaatgaa

SEQ ID NO: 7479 - DNA, 25 bp, Homo sapiens
agttatagacaccagcacacttgga

SEQ ID NO: 7480 - DNA, 25 bp, Homo sapiens
gcacatccagacaccaattactcaa

SEQ ID NO: 7481 - DNA, 25 bp, Homo sapiens
tgaaacagacacacggcgtctgccc

SEQ ID NO: 7482 - DNA, 25 bp, Homo sapiens
tcatcgaacacaccccaacggaggt

SEQ ID NO: 7483 - DNA, 25 bp, Homo sapiens
aatacctacaccacaaagcactgag

SEQ ID NO: 7484 - DNA, 25 bp, Homo sapiens
ttgcacactacaccacacagacggt

SEQ ID NO: 7485 - DNA, 25 bp, Homo sapiens
ctccaccaacaccaattgtgcagtg

SEQ ID NO: 7486 - DNA, 25 bp, Homo sapiens
tattataacaccaccacagaagtct

SEQ ID NO: 7487 - DNA, 25 bp, Homo sapiens
cagccaagcaacaccaagggttggc

SEQ ID NO: 7488 - DNA, 25 bp, Homo sapiens
agtgtccacacaccttattcctctt

SEQ ID NO: 7489 - DNA, 25 bp, Homo sapiens
ctccaaaacaccagaatccacaagg

SEQ ID NO: 7490 - DNA, 25 bp, Homo sapiens
gttgtgaacaccacttcactcacac

SEQ ID NO: 7491 - DNA, 25 bp, Homo sapiens
ccaggacaacaccaccaggaaagtg

SEQ ID NO: 7492 - DNA, 25 bp, Homo sapiens
cactccagacacacgtacggcttgg

SEQ ID NO: 7493 - DNA, 25 bp, Homo sapiens
cgagtatgacacaccacagcagtta

SEQ ID NO: 7494 - DNA, 25 bp, Homo sapiens
tatgcgtacacacccagatacacac

SEQ ID NO: 7495 - DNA, 25 bp, Homo sapiens
gatataggacaccacacaaaatggg

SEQ ID NO: 7496 - DNA, 25 bp, Homo sapiens
agaacatagcacacccactgtagag

SEQ ID NO: 7497 - DNA, 25 bp, Homo sapiens
caggacgcgcacacgaacagcctgt

SEQ ID NO: 7498 - DNA, 25 bp, Homo sapiens
aatggaccacaccacagtggagact

SEQ ID NO: 7499 - DNA, 25 bp, Homo sapiens
ggagcccacaccacatgtgtccagg

SEQ ID NO: 7500 - DNA, 25 bp, Homo sapiens
caatggaccacaccacagtggagac

SEQ ID NO: 7501 - DNA, 25 bp, Homo sapiens
atcccacgcacaccgaagggctggt

SEQ ID NO: 7502 - DNA, 25 bp, Homo sapiens
tagtacacacacgaatgaccactgt

SEQ ID NO: 7503 - DNA, 25 bp, Homo sapiens
ggtgtccacacccacaaacagggat

SEQ ID NO: 7504 - DNA, 25 bp, Homo sapiens
aagcacagcatcacacgtcccagga

SEQ ID NO: 7505 - DNA, 25 bp, Homo sapiens
ttacaacacacccaacaggaagctg

SEQ ID NO: 7506 - DNA, 25 bp, Homo sapiens
ggtgttcacaccacaacagacacgt

SEQ ID NO: 7507 - DNA, 25 bp, Homo sapiens
catatcttacacaccacagtaggca

SEQ ID NO: 7508 - DNA, 25 bp, Homo sapiens
taaacacacacggttggccagtgat

SEQ ID NO: 7509 - DNA, 25 bp, Homo sapiens
cgtggctcacacaccagaaggtatt

SEQ ID NO: 7510 - DNA, 25 bp, Homo sapiens
ggtgagatgcacaccacattcgtgt

SEQ ID NO: 7511 - DNA, 25 bp, Homo sapiens
gaactacacactcaccacagacatg

SEQ ID NO: 7512 - DNA, 25 bp, Homo sapiens
catgagagtcacacacgaggttcca

SEQ ID NO: 7513 - DNA, 25 bp, Homo sapiens
tgatgtacacacacgctagaccctg

SEQ ID NO: 7514 - DNA, 25 bp, Homo sapiens
gtccaccacactgcactggcagtgg

SEQ ID NO: 7515 - DNA, 25 bp, Homo sapiens
tgtcaccaccacaagtccatttctt

SEQ ID NO: 7516 - DNA, 25 bp, Homo sapiens
gcccctccacacctacagctttcca

SEQ ID NO: 7517 - DNA, 25 bp, Homo sapiens
gtggacaccacacccatcacccatt

SEQ ID NO: 7518 - DNA, 25 bp, Homo sapiens
gcttcacacacactggaccattcgt

SEQ ID NO: 7519 - DNA, 25 bp, Homo sapiens
gtgcacaacacactctgctacacag

SEQ ID NO: 7520 - DNA, 25 bp, Homo sapiens
tggatcaagcacactcgctcagtag

SEQ ID NO: 7521 - DNA, 25 bp, Homo sapiens
tgcataacacacactatccacgtaa

SEQ ID NO: 7522 - DNA, 25 bp, Homo sapiens
aggaccaccacactggagtagcact

SEQ ID NO: 7523 - DNA, 25 bp, Homo sapiens
tccaggaccacaccgttggcaggtg

SEQ ID NO: 7524 - DNA, 25 bp, Homo sapiens
ttaaggccacacacgatattcacgg

SEQ ID NO: 7525 - DNA, 25 bp, Homo sapiens
ggtttccacacaccctagaacactg

SEQ ID NO: 7526 - DNA, 25 bp, Homo sapiens
tgtgcccacacactctggtccaaga

SEQ ID NO: 7527 - DNA, 25 bp, Homo sapiens
tgcaaggcccacaccgagcacgtag

SEQ ID NO: 7528 - DNA, 25 bp, Homo sapiens
gatgagctcacacactttctggatc

SEQ ID NO: 7529 - DNA, 25 bp, Homo sapiens
gggacacacactagtgcgctggctt

SEQ ID NO: 7530 - DNA, 25 bp, Homo sapiens
gccacaaccacacctagggatgctt

SEQ ID NO: 7531 - DNA, 25 bp, Homo sapiens
atagcaaaccacactcggcacagga

SEQ ID NO: 7532 - DNA, 25 bp, Homo sapiens
agcaaaccacactcggcacaggaag

SEQ ID NO: 7533 - DNA, 25 bp, Homo sapiens
ataaaaccacaagcaaaccagcctg

SEQ ID NO: 7534 - DNA, 25 bp, Homo sapiens
agagttccacacacgtatcatccat

SEQ ID NO: 7535 - DNA, 25 bp, Homo sapiens
tcacgcaaccacactctaacctggg

SEQ ID NO: 7536 - DNA, 25 bp, Homo sapiens
ggatgccaccacaacacaaagagga

SEQ ID NO: 7537 - DNA, 25 bp, Homo sapiens
agagtttccacaccacagacagagg

SEQ ID NO: 7538 - DNA, 25 bp, Homo sapiens
ctccgtatccacacacacgtgaagg

SEQ ID NO: 7539 - DNA, 25 bp, Homo sapiens
tcgtctcaccacactagagactgcg

SEQ ID NO: 7540 - DNA, 25 bp, Homo sapiens
tgtcaacaccacaaccagcagtatg

SEQ ID NO: 7541 - DNA, 25 bp, Homo sapiens
acattcacaccacacgatgcagcct

SEQ ID NO: 7542 - DNA, 25 bp, Homo sapiens
ttctgaggccacacatctcgaggca

SEQ ID NO: 7543 - DNA, 25 bp, Homo sapiens
tcttttccacacacacagcaggctg

SEQ ID NO: 7544 - DNA, 25 bp, Homo sapiens
accgcagcccacagtttctatgtga

SEQ ID NO: 7545 - DNA, 25 bp, Homo sapiens
caccagcacccacaggttggctgag

SEQ ID NO: 7546 - DNA, 25 bp, Homo sapiens
caaaacaccacacacggcagttgag

SEQ ID NO: 7547 - DNA, 25 bp, Homo sapiens
tggaaaccacacaaagcactcggtg

SEQ ID NO: 7548 - DNA, 25 bp, Homo sapiens
gcagtccaacacaaacaagaacttc

SEQ ID NO: 7549 - DNA, 25 bp, Homo sapiens
ttaggatccacaccaacacagaggc

SEQ ID NO: 7550 - DNA, 25 bp, Homo sapiens
gctcgataccacacaccaaggtctg

SEQ ID NO: 7551 - DNA, 25 bp, Homo sapiens
tgacccagccacactcatggagatg

SEQ ID NO: 7552 - DNA, 25 bp, Homo sapiens
atgccacaaccacacctagggatgc

SEQ ID NO: 7553 - DNA, 25 bp, Homo sapiens
tgttatgcaccacacaacacagtgc

SEQ ID NO: 7554 - DNA, 25 bp, Homo sapiens
taccaagccacacacaagtggtagg

SEQ ID NO: 7555 - DNA, 25 bp, Homo sapiens
agcacacagagccacaacaggagtt

SEQ ID NO: 7556 - DNA, 25 bp, Homo sapiens
atggaacagccacaggagccacgtt

SEQ ID NO: 7557 - DNA, 25 bp, Homo sapiens
cacacccagccacagattagatttt

SEQ ID NO: 7558 - DNA, 25 bp, Homo sapiens
ttcataggcacacacgtcctgcggt

SEQ ID NO: 7559 - DNA, 25 bp, Homo sapiens
tgccattaacacacagactccagta

SEQ ID NO: 7560 - DNA, 25 bp, Homo sapiens
caggaacaacacacttcagttgggc

SEQ ID NO: 7561 - DNA, 25 bp, Homo sapiens
cacaacaaccacatatgaagtatat

SEQ ID NO: 7562 - DNA, 25 bp, Homo sapiens
gaataccacacactgtgacacaggc

SEQ ID NO: 7563 - DNA, 25 bp, Homo sapiens
ttccatacacacaaacattccatac

SEQ ID NO: 7564 - DNA, 25 bp, Homo sapiens
taagtagcacacaggacccaatctg

SEQ ID NO: 7565 - DNA, 25 bp, Homo sapiens
ataaagaacacacactccccattgc

SEQ ID NO: 7566 - DNA, 25 bp, Homo sapiens
aagtggcagccacagcgtgaggcat

SEQ ID NO: 7567 - DNA, 25 bp, Homo sapiens
tagtagcaacacaagcacgcaaacc

SEQ ID NO: 7568 - DNA, 25 bp, Homo sapiens
ctttagagcacacaacaaacatttc

SEQ ID NO: 7569 - DNA, 25 bp, Homo sapiens
cgacttgcaacacaccaagacaaat

SEQ ID NO: 7570 - DNA, 25 bp, Homo sapiens
tagtccaacacactagtgaggagag

SEQ ID NO: 7571 - DNA, 25 bp, Homo sapiens
ttcacaaacacaacgactcacattc

SEQ ID NO: 7572 - DNA, 25 bp, Homo sapiens
cattccatacacacaaacattccat

SEQ ID NO: 7573 - DNA, 25 bp, Homo sapiens
aaatatggacacacactaaacacac

SEQ ID NO: 7574 - DNA, 25 bp, Homo sapiens
tcctcagccacacagagacttggat

SEQ ID NO: 7575 - DNA, 25 bp, Homo sapiens
tgtcgactcacacaagcacggagga

SEQ ID NO: 7576 - DNA, 25 bp, Homo sapiens
cactgatttcacacaccccggagag

SEQ ID NO: 7577 - DNA, 25 bp, Homo sapiens
tggcagccaccacatggcatgaaga

SEQ ID NO: 7578 - DNA, 25 bp, Homo sapiens
gacttgcaacacaccaagacaaatg

SEQ ID NO: 7579 - DNA, 25 bp, Homo sapiens
ccggccaacacacatccatgtgatg

SEQ ID NO: 7580 - DNA, 25 bp, Homo sapiens
tatacccacacagaccattatgagg

SEQ ID NO: 7581 - DNA, 25 bp, Homo sapiens
cagaactggacacaccagacagtta

SEQ ID NO: 7582 - DNA, 25 bp, Homo sapiens
gatagcacatcacacaggctttcgg

SEQ ID NO: 7583 - DNA, 25 bp, Homo sapiens
tctctggagcacacacgtgaacgcc

SEQ ID NO: 7584 - DNA, 25 bp, Homo sapiens
cgcaaaaacacactatttcacgtag

SEQ ID NO: 7585 - DNA, 25 bp, Homo sapiens
aaaggctacacaccatacgaatcca

SEQ ID NO: 7586 - DNA, 25 bp, Homo sapiens
tcttaacacacacgagatgccttgt

SEQ ID NO: 7587 - DNA, 25 bp, Homo sapiens
cgcactcggcacacacatagggttt

SEQ ID NO: 7588 - DNA, 25 bp, Homo sapiens
tgttaaacacaccacagacaagatg

SEQ ID NO: 7589 - DNA, 25 bp, Homo sapiens
ggttaacacacaccaagcagtcgct

SEQ ID NO: 7590 - DNA, 25 bp, Homo sapiens
gcaaaggacacagacactgatgaca

SEQ ID NO: 7591 - DNA, 25 bp, Homo sapiens
gtagcactcacacatccacgtgaat

SEQ ID NO: 7592 - DNA, 25 bp, Homo sapiens
tatttgctcacacactcgggaacca

SEQ ID NO: 7593 - DNA, 25 bp, Homo sapiens
taaagtacacacacagctgacggtg

SEQ ID NO: 7594 - DNA, 25 bp, Homo sapiens
cagtcagactacacaccagctggga

SEQ ID NO: 7595 - DNA, 25 bp, Homo sapiens
gtttcagacacacagcgacacagag

SEQ ID NO: 7596 - DNA, 25 bp, Homo sapiens
tgaagaacacacaacccaggatgat

SEQ ID NO: 7597 - DNA, 25 bp, Homo sapiens
ggcccacacacaattgagtgttcat

SEQ ID NO: 7598 - DNA, 25 bp, Homo sapiens
tggccagcacacacacgataaggga

SEQ ID NO: 7599 - DNA, 25 bp, Homo sapiens
gcatctcagcagacacacctgtttg

SEQ ID NO: 7600 - DNA, 25 bp, Homo sapiens
ggaccacacacatcatcagaacagg

SEQ ID NO: 7601 - DNA, 25 bp, Homo sapiens
agttcacaacacagcagcacacaca

SEQ ID NO: 7602 - DNA, 25 bp, Homo sapiens
gtttctgacacacacagctcagcag

SEQ ID NO: 7603 - DNA, 25 bp, Homo sapiens
ttttgatgacacacatcctccagta

SEQ ID NO: 7604 - DNA, 25 bp, Homo sapiens
tgcagaccacacacaaagttaaata

SEQ ID NO: 7605 - DNA, 25 bp, Homo sapiens
gcagcacatcacacacataagcatg

SEQ ID NO: 7606 - DNA, 25 bp, Homo sapiens
gaaaggcacacacgctggaaaggct

SEQ ID NO: 7607 - DNA, 25 bp, Homo sapiens
ccgtgtatcacacaccaataaaaat

SEQ ID NO: 7608 - DNA, 25 bp, Homo sapiens
taagtgacacacacgggcaactgga

SEQ ID NO: 7609 - DNA, 25 bp, Homo sapiens
cacgcagacaacacagctctcagaa

SEQ ID NO: 7610 - DNA, 25 bp, Homo sapiens
tgacttgctcacacactggcactcg

SEQ ID NO: 7611 - DNA, 25 bp, Homo sapiens
tgctgatactcacacacggaacgaa

SEQ ID NO: 7612 - DNA, 25 bp, Homo sapiens
cgaataccacacactgtgacacagg

SEQ ID NO: 7613 - DNA, 25 bp, Homo sapiens
tgtttctcacacacctacgaatctt

SEQ ID NO: 7614 - DNA, 25 bp, Homo sapiens
taaagtcacacagcacagtaccagc

SEQ ID NO: 7615 - DNA, 25 bp, Homo sapiens
cattttgagcacacactcacaggtg

SEQ ID NO: 7616 - DNA, 25 bp, Homo sapiens
ttcaaccacacactcctctgggaag

SEQ ID NO: 7617 - DNA, 25 bp, Homo sapiens
cacagaattcacacacaaacggttt

SEQ ID NO: 7618 - DNA, 25 bp, Homo sapiens
gagatagccacacactgtcctctgt

SEQ ID NO: 7619 - DNA, 25 bp, Homo sapiens
acaggtgacacacactccagggcat

SEQ ID NO: 7620 - DNA, 25 bp, Homo sapiens
tgatggagtcacacaccaggaaagt

SEQ ID NO: 7621 - DNA, 25 bp, Homo sapiens
gatggagcactcacacagtcgggtt

SEQ ID NO: 7622 - DNA, 25 bp, Homo sapiens
gccggagcacacacgtccgaagagt

SEQ ID NO: 7623 - DNA, 25 bp, Homo sapiens
gcagtgggcacacacactctctgtg

SEQ ID NO: 7624 - DNA, 25 bp, Homo sapiens
ctgctggcgcacacacagaggccgg

SEQ ID NO: 7625 - DNA, 25 bp, Homo sapiens
taaaccacacaacctcagcgagatg

SEQ ID NO: 7626 - DNA, 25 bp, Homo sapiens
tggcatacgcacacataaagaaggg

SEQ ID NO: 7627 - DNA, 25 bp, Homo sapiens
catacatgagcacacacacatttac

SEQ ID NO: 7628 - DNA, 25 bp, Homo sapiens
gcgtagtcacacacacatgccatct

SEQ ID NO: 7629 - DNA, 25 bp, Homo sapiens
gagtatagcacacaccatgagccct

SEQ ID NO: 7630 - DNA, 25 bp, Homo sapiens
tatacagagcacacacctcatgggc

SEQ ID NO: 7631 - DNA, 25 bp, Homo sapiens
acatacatgagcacacacacattta

SEQ ID NO: 7632 - DNA, 25 bp, Homo sapiens
gcagggacacacatcaagcagcgag

SEQ ID NO: 7633 - DNA, 25 bp, Homo sapiens
cgcagaagcacacacagcaggtctg

SEQ ID NO: 7634 - DNA, 25 bp, Homo sapiens
tgagggtgacacatctcacacacgc

SEQ ID NO: 7635 - DNA, 25 bp, Homo sapiens
gcgaaagtcaccacaggccccggga

SEQ ID NO: 7636 - DNA, 25 bp, Homo sapiens
tattgtattcaccacacacgtaggc

SEQ ID NO: 7637 - DNA, 25 bp, Homo sapiens
aagcaccgctcacctgtgagatcac

SEQ ID NO: 7638 - DNA, 25 bp, Homo sapiens
cattcaccagctcaccagacatgtg

SEQ ID NO: 7639 - DNA, 25 bp, Homo sapiens
ttgacggatcaccaccacctgggac

SEQ ID NO: 7640 - DNA, 25 bp, Homo sapiens
tggctgtgctgctcactcaagggag

SEQ ID NO: 7641 - DNA, 25 bp, Homo sapiens
tggaatttcacacacccagtgaatg

SEQ ID NO: 7642 - DNA, 25 bp, Homo sapiens
ggtgtaatcacacacggcacagtag

SEQ ID NO: 7643 - DNA, 25 bp, Homo sapiens
tgaagacatcatcacccaggaggga

SEQ ID NO: 7644 - DNA, 25 bp, Homo sapiens
gaatacacatcaccacctccgtgag

SEQ ID NO: 7645 - DNA, 25 bp, Homo sapiens
tgatggagcactcacacagtcgggt

SEQ ID NO: 7646 - DNA, 25 bp, Homo sapiens
tactcagttcacacacagacagcaa

SEQ ID NO: 7647 - DNA, 25 bp, Homo sapiens
acagctctcactcacaaacggatga

SEQ ID NO: 7648 - DNA, 25 bp, Homo sapiens
gaggccatctcacacatgcctgtga

SEQ ID NO: 7649 - DNA, 25 bp, Homo sapiens
ttctctgcactcacacgggagagga

SEQ ID NO: 7650 - DNA, 25 bp, Homo sapiens
gggtgcgtcacacacacaggatgct

SEQ ID NO: 7651 - DNA, 25 bp, Homo sapiens
tggccacagtcacacaccgcaccac

SEQ ID NO: 7652 - DNA, 25 bp, Homo sapiens
agtcacacagtcacacacggaagca

SEQ ID NO: 7653 - DNA, 25 bp, Homo sapiens
ggcacacagtcacatccactacagg

SEQ ID NO: 7654 - DNA, 25 bp, Homo sapiens
cataacaagctcacacatgcgcgtg

SEQ ID NO: 7655 - DNA, 25 bp, Homo sapiens
cggaaggctcacaatgtacagcatg

SEQ ID NO: 7656 - DNA, 25 bp, Homo sapiens
gattgaagatcacacacacaattgt

SEQ ID NO: 7657 - DNA, 25 bp, Homo sapiens
gggttgctcacacagcagtgactca

SEQ ID NO: 7658 - DNA, 25 bp, Homo sapiens
taacaagctcacacatgcgcgtgaa

SEQ ID NO: 7659 - DNA, 25 bp, Homo sapiens
ggtccgctcacacatatgcagaacg

SEQ ID NO: 7660 - DNA, 25 bp, Homo sapiens
tgtgcgcacatgctcacatcggctg

SEQ ID NO: 7661 - DNA, 25 bp, Homo sapiens
cttttaggcaaacacaacctgcttc

SEQ ID NO: 7662 - DNA, 25 bp, Homo sapiens
gagttgcgatcacacacctctgcac

SEQ ID NO: 7663 - DNA, 25 bp, Homo sapiens
taataaggcaaccacacacttcaca

SEQ ID NO: 7664 - DNA, 25 bp, Homo sapiens
ttcatgctcaggcaacaacactgag

SEQ ID NO: 7665 - DNA, 25 bp, Homo sapiens
tggtggctggcaacttgtgtccctt

SEQ ID NO: 7666 - DNA, 25 bp, Homo sapiens
gggcatctggcaacatccggcataa

SEQ ID NO: 7667 - DNA, 25 bp, Homo sapiens
tccaagggcaataaagcagctccac

SEQ ID NO: 7668 - DNA, 25 bp, Homo sapiens
cctgctgtggcgcaaaagttggacc

SEQ ID NO: 7669 - DNA, 25 bp, Homo sapiens
cttctaatggcaagaacaacaacta

SEQ ID NO: 7670 - DNA, 25 bp, Homo sapiens
ccatttacagcaagaagagccagca

SEQ ID NO: 7671 - DNA, 25 bp, Homo sapiens
tctctgctagagcaacaaggtgagc

SEQ ID NO: 7672 - DNA, 25 bp, Homo sapiens
tcaccaccagcaaaaacatagccaa

SEQ ID NO: 7673 - DNA, 25 bp, Homo sapiens
tattaggcagcaacacgaagggtct

SEQ ID NO: 7674 - DNA, 25 bp, Homo sapiens
cagacgcagcacagcaaacattttt

SEQ ID NO: 7675 - DNA, 25 bp, Homo sapiens
ttggagagcagcaaaccagccaaag

SEQ ID NO: 7676 - DNA, 25 bp, Homo sapiens
aacacttgtgcaaatcacaccacac

SEQ ID NO: 7677 - DNA, 25 bp, Homo sapiens
accgacttgcaacacaccaagacaa

SEQ ID NO: 7678 - DNA, 25 bp, Homo sapiens
gcaacgctcgcacgtccgacagcac

SEQ ID NO: 7679 - DNA, 25 bp, Homo sapiens
gaaacacgcactgataagctacacc

SEQ ID NO: 7680 - DNA, 25 bp, Homo sapiens
ggaccacgcacgtatctcttgagaa

SEQ ID NO: 7681 - DNA, 25 bp, Homo sapiens
tgagacttcgcacgcatggcttgga

SEQ ID NO: 7682 - DNA, 25 bp, Homo sapiens
tagatgaacgcacgctgacacgtag

SEQ ID NO: 7683 - DNA, 25 bp, Homo sapiens
gacccatcgcacccagtgcaagtag

SEQ ID NO: 7684 - DNA, 25 bp, Homo sapiens
tcgtatgccgcacgcatgtcgcaga

SEQ ID NO: 7685 - DNA, 25 bp, Homo sapiens
agcaggacacgcacttgccggtcct

SEQ ID NO: 7686 - DNA, 25 bp, Homo sapiens
ttaaacgcacgacacccattgaaca

SEQ ID NO: 7687 - DNA, 25 bp, Homo sapiens
tgtcgagccgcacgcactgcgtgtc

SEQ ID NO: 7688 - DNA, 25 bp, Homo sapiens
gcttggcacgcacgatgcccttctt

SEQ ID NO: 7689 - DNA, 25 bp, Homo sapiens
tccacgcaggcacctcagggtgatg

SEQ ID NO: 7690 - DNA, 25 bp, Homo sapiens
gcatctgctcacgcacgctgctgat

SEQ ID NO: 7691 - DNA, 25 bp, Homo sapiens
acatgcacatgcacgcacgcgcgca

SEQ ID NO: 7692 - DNA, 25 bp, Homo sapiens
tcaccaccgcactgactaagcaggt

SEQ ID NO: 7693 - DNA, 25 bp, Homo sapiens
cgccacgcagagcactagggcgatg

SEQ ID NO: 7694 - DNA, 25 bp, Homo sapiens
gcgctccacgcacttttgtttattc

SEQ ID NO: 7695 - DNA, 25 bp, Homo sapiens
gcaacacaagcacgcaaaccaaagg

SEQ ID NO: 7696 - DNA, 25 bp, Homo sapiens
tgagtaccagcacgaccatcagtaa

SEQ ID NO: 7697 - DNA, 25 bp, Homo sapiens
gaagataagcaccacacagatatgg

SEQ ID NO: 7698 - DNA, 25 bp, Homo sapiens
cacttgacacgcacataatggagga

SEQ ID NO: 7699 - DNA, 25 bp, Homo sapiens
ttgagagacgcacaccaccgtctgg

SEQ ID NO: 7700 - DNA, 25 bp, Homo sapiens
ttcaaccgcacaaacgcaggcacgg

SEQ ID NO: 7701 - DNA, 25 bp, Homo sapiens
tgcacagaacgcacacagtgcacgg

SEQ ID NO: 7702 - DNA, 25 bp, Homo sapiens
gagaaatcagcactcacacccagtt

SEQ ID NO: 7703 - DNA, 25 bp, Homo sapiens
cacacttaggcacaaacaccaaatc

SEQ ID NO: 7704 - DNA, 25 bp, Homo sapiens
aaggcacacgcacagagagggagat

SEQ ID NO: 7705 - DNA, 25 bp, Homo sapiens
gcagcagacaggcacacagcagccg

SEQ ID NO: 7706 - DNA, 25 bp, Homo sapiens
ggatttgcgcacacagacaactttt

SEQ ID NO: 7707 - DNA, 25 bp, Homo sapiens
cgtggcccagcacacagaactctgg

SEQ ID NO: 7708 - DNA, 25 bp, Homo sapiens
caaaatgaagcacacaccagagtcc

SEQ ID NO: 7709 - DNA, 25 bp, Homo sapiens
ccaggtgtgcgcacacacagtcatc

SEQ ID NO: 7710 - DNA, 25 bp, Homo sapiens
tgcttactagcacacacaatgagga

SEQ ID NO: 7711 - DNA, 25 bp, Homo sapiens
gtggtacgcacaccagcagcatcag

SEQ ID NO: 7712 - DNA, 25 bp, Homo sapiens
tttattcagcacacacagagtaggg

SEQ ID NO: 7713 - DNA, 25 bp, Homo sapiens
tacacacaagcacatgtgcacacat

SEQ ID NO: 7714 - DNA, 25 bp, Homo sapiens
attctaaagcacaccagcacagcgg

SEQ ID NO: 7715 - DNA, 25 bp, Homo sapiens
accggatagcacagcccacatgtta

SEQ ID NO: 7716 - DNA, 25 bp, Homo sapiens
atttgtgtgtgcaccgcgtctccag

SEQ ID NO: 7717 - DNA, 25 bp, Homo sapiens
aaacccagcacacatcacatacaca

SEQ ID NO: 7718 - DNA, 25 bp, Homo sapiens
ctgtgaactgcagcacacacaccat

SEQ ID NO: 7719 - DNA, 25 bp, Homo sapiens
tgcaaccacagcacagatgatctgg

SEQ ID NO: 7720 - DNA, 25 bp, Homo sapiens
gtgcaagattgcacccacaactggg

SEQ ID NO: 7721 - DNA, 25 bp, Homo sapiens
gtgcacatgcacatgcacgcacgcg

SEQ ID NO: 7722 - DNA, 25 bp, Homo sapiens
cacgaaagccagtcccacaatgatg

SEQ ID NO: 7723 - DNA, 25 bp, Homo sapiens
atacaccaccagtcatcatcattgg

SEQ ID NO: 7724 - DNA, 25 bp, Homo sapiens
aagccacagccagttgtaatacatt

SEQ ID NO: 7725 - DNA, 25 bp, Homo sapiens
cacacgacaccagtagtcaacactg

SEQ ID NO: 7726 - DNA, 25 bp, Homo sapiens
tcacccagccagatcgaatgaatca

SEQ ID NO: 7727 - DNA, 25 bp, Homo sapiens
gtgagcacgacaggacacctgagcc

SEQ ID NO: 7728 - DNA, 25 bp, Homo sapiens
cagtcacaccacaggacaaaagcaa

SEQ ID NO: 7729 - DNA, 25 bp, Homo sapiens
ctggtcacacacaggagcacagaca

SEQ ID NO: 7730 - DNA, 25 bp, Homo sapiens
gcaaaccacaggctacaaaaattta

SEQ ID NO: 7731 - DNA, 25 bp, Homo sapiens
aaatattgcacaggacacacactaa

SEQ ID NO: 7732 - DNA, 25 bp, Homo sapiens
tccacccacagtcactcatgggagg

SEQ ID NO: 7733 - DNA, 25 bp, Homo sapiens
cacccacccagagaaatctctaatt

SEQ ID NO: 7734 - DNA, 25 bp, Homo sapiens
acacaccacacagtgcacatgtgca

SEQ ID NO: 7735 - DNA, 25 bp, Homo sapiens
gaaccaccagacttccatacatttg

SEQ ID NO: 7736 - DNA, 25 bp, Homo sapiens
aatggcaaccagacaaccgacatgt

SEQ ID NO: 7737 - DNA, 25 bp, Homo sapiens
tatcacacagccagacatacactct

SEQ ID NO: 7738 - DNA, 25 bp, Homo sapiens
tttaacacagaaccccatagccaga

SEQ ID NO: 7739 - DNA, 25 bp, Homo sapiens
tgtggcagaacagattgaagaagtt

SEQ ID NO: 7740 - DNA, 25 bp, Homo sapiens
tgtggccaacagaaaacacagactt

SEQ ID NO: 7741 - DNA, 25 bp, Homo sapiens
ccaccgccacagatacgagggaggt

SEQ ID NO: 7742 - DNA, 25 bp, Homo sapiens
gcaggctcacacagaactattagca

SEQ ID NO: 7743 - DNA, 25 bp, Homo sapiens
tgatttgacacagacagcgggactg

SEQ ID NO: 7744 - DNA, 25 bp, Homo sapiens
ctgtatgacacacagacgagaagtg

SEQ ID NO: 7745 - DNA, 25 bp, Homo sapiens
ccaccgccacagacacgagggcggt

SEQ ID NO: 7746 - DNA, 25 bp, Homo sapiens
ccaccaccacagacacgagggaggt

SEQ ID NO: 7747 - DNA, 25 bp, Homo sapiens
tgctcggcacacagacagattttca

SEQ ID NO: 7748 - DNA, 25 bp, Homo sapiens
aaatatcagacagacccagcaggga

SEQ ID NO: 7749 - DNA, 25 bp, Homo sapiens
tggacacacacagatttcgtagagg

SEQ ID NO: 7750 - DNA, 25 bp, Homo sapiens
tcaagtctacagacaacaccacaga

SEQ ID NO: 7751 - DNA, 25 bp, Homo sapiens
tccgatgatacagatatattacagg

SEQ ID NO: 7752 - DNA, 25 bp, Homo sapiens
atgcgggaggcaggttcccgaggag

SEQ ID NO: 7753 - DNA, 25 bp, Homo sapiens
tgatgagcagcacacagacggcatt

SEQ ID NO: 7754 - DNA, 25 bp, Homo sapiens
ttgcaaacacagagccccagagatc

SEQ ID NO: 7755 - DNA, 25 bp, Homo sapiens
aacgccgcacagatttatcatctcg

SEQ ID NO: 7756 - DNA, 25 bp, Homo sapiens
tcttggcttcagttggcgagcttgg

SEQ ID NO: 7757 - DNA, 25 bp, Homo sapiens
tgaagtggtcaggttcaaccagtac

SEQ ID NO: 7758 - DNA, 25 bp, Homo sapiens
caagaatgttcaggcacacacgcgt

SEQ ID NO: 7759 - DNA, 25 bp, Homo sapiens
tttattatcagctctcccaccatct

SEQ ID NO: 7760 - DNA, 25 bp, Homo sapiens
gattagttcagtcacagcacacagc

SEQ ID NO: 7761 - DNA, 25 bp, Homo sapiens
aacttggcatcaggcacactcacga

SEQ ID NO: 7762 - DNA, 25 bp, Homo sapiens
tcagcaaactcagaacaaaagtcag

SEQ ID NO: 7763 - DNA, 25 bp, Homo sapiens
gcgcggagctcagacacacgtccat

SEQ ID NO: 7764 - DNA, 25 bp, Homo sapiens
taaataatcagacacacactacact

SEQ ID NO: 7765 - DNA, 25 bp, Homo sapiens
ctgggccacatcagacacacagtaa

SEQ ID NO: 7766 - DNA, 25 bp, Homo sapiens
gcctggcccagccaacctggcacag

SEQ ID NO: 7767 - DNA, 25 bp, Homo sapiens
aaacaaacagcgctcgccgaagggt

SEQ ID NO: 7768 - DNA, 25 bp, Homo sapiens
cagatacaaccagccttgtattgac

SEQ ID NO: 7769 - DNA, 25 bp, Homo sapiens
ggcaccccagccatggagcactttg

SEQ ID NO: 7770 - DNA, 25 bp, Homo sapiens
agagatccagccagccacaaattcc

SEQ ID NO: 7771 - DNA, 25 bp, Homo sapiens
gaaacacacagcaatactttaaacg

SEQ ID NO: 7772 - DNA, 25 bp, Homo sapiens
aactttacagcttcacacacccagg

SEQ ID NO: 7773 - DNA, 25 bp, Homo sapiens
catgtttcaacagccaaaacacttt

SEQ ID NO: 7774 - DNA, 25 bp, Homo sapiens
tctggacccagctgcatagaagaca

SEQ ID NO: 7775 - DNA, 25 bp, Homo sapiens
cacaaacccagcacacatcacatac

SEQ ID NO: 7776 - DNA, 25 bp, Homo sapiens
cagatagccacacagcggtcaaatg

SEQ ID NO: 7777 - DNA, 25 bp, Homo sapiens
tgttcacacacagccacgttggagg

SEQ ID NO: 7778 - DNA, 25 bp, Homo sapiens
accgagcacacagcttcaggaggga

SEQ ID NO: 7779 - DNA, 25 bp, Homo sapiens
ttggacaccagcacacggacaaact

SEQ ID NO: 7780 - DNA, 25 bp, Homo sapiens
tttagcacacagcaaaacatgaagt

SEQ ID NO: 7781 - DNA, 25 bp, Homo sapiens
tggttaccagcaaggcagcacagat

SEQ ID NO: 7782 - DNA, 25 bp, Homo sapiens
ggaagagccagcaaccacgtgtatc

SEQ ID NO: 7783 - DNA, 25 bp, Homo sapiens
ggcacatcacacagctgcacatgaa

SEQ ID NO: 7784 - DNA, 25 bp, Homo sapiens
taatactacagcacaccaagggtta

SEQ ID NO: 7785 - DNA, 25 bp, Homo sapiens
caggatcacccagcacagctgcatg

SEQ ID NO: 7786 - DNA, 25 bp, Homo sapiens
tgataaaacagcaccacataacgca

SEQ ID NO: 7787 - DNA, 25 bp, Homo sapiens
aacaggaacagcaacacacgggcac

SEQ ID NO: 7788 - DNA, 25 bp, Homo sapiens
tactccaacagcacaaaccatgatc

SEQ ID NO: 7789 - DNA, 25 bp, Homo sapiens
aggaccacacagcagagcacctggt

SEQ ID NO: 7790 - DNA, 25 bp, Homo sapiens
tcccatctggcaggtaacggcgaat

SEQ ID NO: 7791 - DNA, 25 bp, Homo sapiens
gcgcggggcagtgggcggcgcatcc

SEQ ID NO: 7792 - DNA, 25 bp, Homo sapiens
ccctggaggcaggatgtctgaaaac

SEQ ID NO: 7793 - DNA, 25 bp, Homo sapiens
caaacacaggcaggattattctcac

SEQ ID NO: 7794 - DNA, 25 bp, Homo sapiens
ctggagaccgcagacaacacagacg

SEQ ID NO: 7795 - DNA, 25 bp, Homo sapiens
cctatagtagcagtcttcactaatt

SEQ ID NO: 7796 - DNA, 25 bp, Homo sapiens
gaaggcggcagaaaaagactaccag

SEQ ID NO: 7797 - DNA, 25 bp, Homo sapiens
acttcgcacgcagcaccagaggctg

SEQ ID NO: 7798 - DNA, 25 bp, Homo sapiens
gctgggtgctgcagtgtatatcttt

SEQ ID NO: 7799 - DNA, 25 bp, Homo sapiens
aggatgtgtgtgcagaattcactca

SEQ ID NO: 7800 - DNA, 25 bp, Homo sapiens
tgctggagctggcagctagcgcctc

SEQ ID NO: 7801 - DNA, 25 bp, Homo sapiens
taagccaaattcaaacaccactctg

SEQ ID NO: 7802 - DNA, 25 bp, Homo sapiens
caccaccacaattatgcagttgagt

SEQ ID NO: 7803 - DNA, 25 bp, Homo sapiens
cagggctgctgcaattgtaataggt

SEQ ID NO: 7804 - DNA, 25 bp, Homo sapiens
gtggcaaaatatcctagactttcag

SEQ ID NO: 7805 - DNA, 25 bp, Homo sapiens
gatatgaacaattccaccaccagcc

SEQ ID NO: 7806 - DNA, 25 bp, Homo sapiens
tggctacatcaataagcacacacca

SEQ ID NO: 7807 - DNA, 25 bp, Homo sapiens
tggccctaatacacacactgctgag

SEQ ID NO: 7808 - DNA, 25 bp, Homo sapiens
tctaagatgaataccacacactcca

SEQ ID NO: 7809 - DNA, 25 bp, Homo sapiens
agtgcaacgaataagccacacacag

SEQ ID NO: 7810 - DNA, 25 bp, Homo sapiens
tataagacaatacacacacaaggga

SEQ ID NO: 7811 - DNA, 25 bp, Homo sapiens
gccagtcttatttgcttatttttcc

SEQ ID NO: 7812 - DNA, 25 bp, Homo sapiens
tgcatcacaccaatatccacacagt

SEQ ID NO: 7813 - DNA, 25 bp, Homo sapiens
cacagcctggctatacagtgcatcc

SEQ ID NO: 7814 - DNA, 25 bp, Homo sapiens
aggttaaatcctcccgacacaccag

SEQ ID NO: 7815 - DNA, 25 bp, Homo sapiens
tcaccaacaatcgagtctccaacag

SEQ ID NO: 7816 - DNA, 25 bp, Homo sapiens
agctaattcaatccagcagccagag

SEQ ID NO: 7817 - DNA, 25 bp, Homo sapiens
cacttgtgcaaatcacaccacacag

SEQ ID NO: 7818 - DNA, 25 bp, Homo sapiens
tacacgcacaatcagaacaccacat

SEQ ID NO: 7819 - DNA, 25 bp, Homo sapiens
gaatgctgattatccacacacgcgc

SEQ ID NO: 7820 - DNA, 25 bp, Homo sapiens
gggacactatcccagcacacatggg

SEQ ID NO: 7821 - DNA, 25 bp, Homo sapiens
caggcagctggtatctgttcgcagg

SEQ ID NO: 7822 - DNA, 25 bp, Homo sapiens
tgcaccctggatttgcatacattct

SEQ ID NO: 7823 - DNA, 25 bp, Homo sapiens
gtggagagagatacaccacactgcc

SEQ ID NO: 7824 - DNA, 25 bp, Homo sapiens
gacacaggagatacacacacactgt

SEQ ID NO: 7825 - DNA, 25 bp, Homo sapiens
ttaattcagataactcaccaccacc

SEQ ID NO: 7826 - DNA, 25 bp, Homo sapiens
caagaggtcatgattgcagaagagg

SEQ ID NO: 7827 - DNA, 25 bp, Homo sapiens
gcaagtgtgtgatagaatgatttaa

SEQ ID NO: 7828 - DNA, 25 bp, Homo sapiens
gtagtgtgtgcatagtggtgtgtgt

SEQ ID NO: 7829 - DNA, 25 bp, Homo sapiens
gacaagtagatctccacaccacaat

SEQ ID NO: 7830 - DNA, 25 bp, Homo sapiens
gatgggggatcaacacacaccttca

SEQ ID NO: 7831 - DNA, 25 bp, Homo sapiens
cagcccagacaatgagatgcaagag

SEQ ID NO: 7832 - DNA, 25 bp, Homo sapiens
tgatacacgtatgcacagcacacag

SEQ ID NO: 7833 - DNA, 25 bp, Homo sapiens
tctgtttggatgtgtgtgtgccctc

SEQ ID NO: 7834 - DNA, 25 bp, Homo sapiens
tacatggatggatgttcagagcctg

SEQ ID NO: 7835 - DNA, 25 bp, Homo sapiens
tctgctttgtgatgctgcggcaggc

SEQ ID NO: 7836 - DNA, 25 bp, Homo sapiens
agcacgcacttgatgcccagctctg

SEQ ID NO: 7837 - DNA, 25 bp, Homo sapiens
gatggcctgagatgctcaaacagat

SEQ ID NO: 7838 - DNA, 25 bp, Homo sapiens
cctggcaaacattagaatatacaag

SEQ ID NO: 7839 - DNA, 25 bp, Homo sapiens
gataacaacattaggcacaaacttc

SEQ ID NO: 7840 - DNA, 25 bp, Homo sapiens
ccaccaccacattagcttagatatg

SEQ ID NO: 7841 - DNA, 25 bp, Homo sapiens
caaacacacacatttataacttgat

SEQ ID NO: 7842 - DNA, 25 bp, Homo sapiens
acactacacacatacaacttacaca

SEQ ID NO: 7843 - DNA, 25 bp, Homo sapiens
accagacaacatagtcagacacggg

SEQ ID NO: 7844 - DNA, 25 bp, Homo sapiens
tcacaccgcacatagagatgggtag

SEQ ID NO: 7845 - DNA, 25 bp, Homo sapiens
gcacatcacacacataagcatgaaa

SEQ ID NO: 7846 - DNA, 25 bp, Homo sapiens
acaaatttcataagctccacctcga

SEQ ID NO: 7847 - DNA, 25 bp, Homo sapiens
gaacattgctcattaggccagcaac

SEQ ID NO: 7848 - DNA, 25 bp, Homo sapiens
gatccagccacatcacaccaggatt

SEQ ID NO: 7849 - DNA, 25 bp, Homo sapiens
atcatggaggccatcaccacccgat

SEQ ID NO: 7850 - DNA, 25 bp, Homo sapiens
aaaggaacatctcgcacacaagtgt

SEQ ID NO: 7851 - DNA, 25 bp, Homo sapiens
gggtgacacatctcacacacgcatg

SEQ ID NO: 7852 - DNA, 25 bp, Homo sapiens
tgatccagccacatcacaccaggat

SEQ ID NO: 7853 - DNA, 25 bp, Homo sapiens
gaggataggcatcagctgcacaaac

SEQ ID NO: 7854 - DNA, 25 bp, Homo sapiens
cacaaagtgtgcattgggtgtgtgc

SEQ ID NO: 7855 - DNA, 25 bp, Homo sapiens
tcagcaaggcgcatcacacaaaagg

SEQ ID NO: 7856 - DNA, 25 bp, Homo sapiens
tgggtgtgtgcatgagcgtggaccc

SEQ ID NO: 7857 - DNA, 25 bp, Homo sapiens
tctcttgcccatgcatactctgaag

SEQ ID NO: 7858 - DNA, 25 bp, Homo sapiens
atgcagtccccatgacaacaaatga

SEQ ID NO: 7859 - DNA, 25 bp, Homo sapiens
tgggctagtcatgtaacctccagga

SEQ ID NO: 7860 - DNA, 25 bp, Homo sapiens
ctggatggatgccatgatggtcctg

SEQ ID NO: 7861 - DNA, 25 bp, Homo sapiens
acagctcacacatgcatgtgaacac

SEQ ID NO: 7862 - DNA, 25 bp, Homo sapiens
cacagctcacacatgcatgtgaaca

SEQ ID NO: 7863 - DNA, 25 bp, Homo sapiens
gggtgtgtgcatgagcgtggacccg

SEQ ID NO: 7864 - DNA, 25 bp, Homo sapiens
acaagctcacacatgcgcgtgaaaa

SEQ ID NO: 7865 - DNA, 25 bp, Homo sapiens
ggcttataggcggtagtttcctcag

SEQ ID NO: 7866 - DNA, 25 bp, Homo sapiens
gaggtgcgggccggcgcggtcgggc

SEQ ID NO: 7867 - DNA, 25 bp, Homo sapiens
gatgctctccgggtctgtgccgagg

SEQ ID NO: 7868 - DNA, 25 bp, Homo sapiens
taaaacgggcggcaggatacggcgc

SEQ ID NO: 7869 - DNA, 25 bp, Homo sapiens
caaacccgggctgtgcaacaagtgt

SEQ ID NO: 7870 - DNA, 25 bp, Homo sapiens
cggcgcggcgggctatatagcagga

SEQ ID NO: 7871 - DNA, 25 bp, Homo sapiens
tcggctgcgggtatattccaattcc

SEQ ID NO: 7872 - DNA, 25 bp, Homo sapiens
gaggtgcagggttcaggtctttaat

SEQ ID NO: 7873 - DNA, 25 bp, Homo sapiens
cctgggctgggttcccggagatgtc

SEQ ID NO: 7874 - DNA, 25 bp, Homo sapiens
tctgtgtctgggtagcagtgcccca

SEQ ID NO: 7875 - DNA, 25 bp, Homo sapiens
caagaatagggtctggctggattcc

SEQ ID NO: 7876 - DNA, 25 bp, Homo sapiens
gttaatgggtttttgtgcctgaaga

SEQ ID NO: 7877 - DNA, 25 bp, Homo sapiens
accatgccgggtctgggtctgtgcc

SEQ ID NO: 7878 - DNA, 25 bp, Homo sapiens
tggagaagggtgacgactaaggcga

SEQ ID NO: 7879 - DNA, 25 bp, Homo sapiens
tgtgtgtgtgggtctacatacacat

SEQ ID NO: 7880 - DNA, 25 bp, Homo sapiens
acctgccgggtggtggcgctgtaca

SEQ ID NO: 7881 - DNA, 25 bp, Homo sapiens
tgcgtgtgtgggtgggtgcgcattt

SEQ ID NO: 7882 - DNA, 25 bp, Homo sapiens
tttgccagggtgtgcgcgtcttccc

SEQ ID NO: 7883 - DNA, 25 bp, Homo sapiens
cgcctgtgtgggtgcacatttgtgt

SEQ ID NO: 7884 - DNA, 25 bp, Homo sapiens
cacaggagcgggtgaccttcatgct

SEQ ID NO: 7885 - DNA, 25 bp, Homo sapiens
gaaggctgggtgtgtattccactaa

SEQ ID NO: 7886 - DNA, 25 bp, Homo sapiens
tcacctgtgggtgcgtgtctgacag

SEQ ID NO: 7887 - DNA, 25 bp, Homo sapiens
cctgtctggcggtcatcgttgtcct

SEQ ID NO: 7888 - DNA, 25 bp, Homo sapiens
ccagaggacggtcggcgaagcgcca

SEQ ID NO: 7889 - DNA, 25 bp, Homo sapiens
gtagcggcggttatcgcgaaactaa

SEQ ID NO: 7890 - DNA, 25 bp, Homo sapiens
cgcggcggcggtccggcgggcggcc

SEQ ID NO: 7891 - DNA, 25 bp, Homo sapiens
tgtgtgtgccggtcctggacagtca

SEQ ID NO: 7892 - DNA, 25 bp, Homo sapiens
ctgtcggtcggtctgtgcatcctgg

SEQ ID NO: 7893 - DNA, 25 bp, Homo sapiens
aacctggcggttgtgtgcatggatc

SEQ ID NO: 7894 - DNA, 25 bp, Homo sapiens
aagagttgcggtggcggctgagccc

SEQ ID NO: 7895 - DNA, 25 bp, Homo sapiens
gggcggcggtgcgtcgttatcatgc

SEQ ID NO: 7896 - DNA, 25 bp, Homo sapiens
ttgcaggagcggtgccgccttctct

SEQ ID NO: 7897 - DNA, 25 bp, Homo sapiens
tccggtgcggtccatcgcgggcaac

SEQ ID NO: 7898 - DNA, 25 bp, Homo sapiens
cacacaccgcggtcaaggagagcca

SEQ ID NO: 7899 - DNA, 25 bp, Homo sapiens
gacacggcggtcttgacagcataga

SEQ ID NO: 7900 - DNA, 25 bp, Homo sapiens
acagagcaggcggtattgacacagc

SEQ ID NO: 7901 - DNA, 25 bp, Homo sapiens
tagcttccggtggtggctggccatt

SEQ ID NO: 7902 - DNA, 25 bp, Homo sapiens
cactgtgggcggtcgtggctaccat

SEQ ID NO: 7903 - DNA, 25 bp, Homo sapiens
tttcccggtgtgtggcgtgacatgt

SEQ ID NO: 7904 - DNA, 25 bp, Homo sapiens
tgtgaggccggtgctgggtgcagac

SEQ ID NO: 7905 - DNA, 25 bp, Homo sapiens
ctccgctctgcggtgctgaggctgc

SEQ ID NO: 7906 - DNA, 25 bp, Homo sapiens
atggcctggcggtggctgagctcca

SEQ ID NO: 7907 - DNA, 25 bp, Homo sapiens
cacgttgagcggtgtggtgtccctc

SEQ ID NO: 7908 - DNA, 25 bp, Homo sapiens
taacaggcggtgtgtgctgccagat

SEQ ID NO: 7909 - DNA, 25 bp, Homo sapiens
gtctgcagtagggtaccacacacag

SEQ ID NO: 7910 - DNA, 25 bp, Homo sapiens
gcgccgctgagggtccatcttttta

SEQ ID NO: 7911 - DNA, 25 bp, Homo sapiens
atgggtgccagggtcccagccacag

SEQ ID NO: 7912 - DNA, 25 bp, Homo sapiens
ctgaatgtgccagggtgagtgagca

SEQ ID NO: 7913 - DNA, 25 bp, Homo sapiens
cctgggctcagggttcagcagctcc

SEQ ID NO: 7914 - DNA, 25 bp, Homo sapiens
gcacgggcagggtgatgcggaatac

SEQ ID NO: 7915 - DNA, 25 bp, Homo sapiens
gaatgcggcaggtcgtctttgcagt

SEQ ID NO: 7916 - DNA, 25 bp, Homo sapiens
ctctgggcagaggtgcacggctcag

SEQ ID NO: 7917 - DNA, 25 bp, Homo sapiens
cagagctgggaggtgtgtggtgcca

SEQ ID NO: 7918 - DNA, 25 bp, Homo sapiens
catcctcctaggtgctgtgctcagg

SEQ ID NO: 7919 - DNA, 25 bp, Homo sapiens
ggtggccaggtgtcatgcttagctc

SEQ ID NO: 7920 - DNA, 25 bp, Homo sapiens
aaacacacaggtacactggcgggca

SEQ ID NO: 7921 - DNA, 25 bp, Homo sapiens
tgaggaggcaggttttcaacattcc

SEQ ID NO: 7922 - DNA, 25 bp, Homo sapiens
gcaacacacaggtaacatgaacagg

SEQ ID NO: 7923 - DNA, 25 bp, Homo sapiens
atgcggtggcaggtgtcacagccaa

SEQ ID NO: 7924 - DNA, 25 bp, Homo sapiens
caccagtggcaggtggagtacccga

SEQ ID NO: 7925 - DNA, 25 bp, Homo sapiens
tagcagcaggcaggtactggtacca

SEQ ID NO: 7926 - DNA, 25 bp, Homo sapiens
agccacggcaggtatggcgtctgca

SEQ ID NO: 7927 - DNA, 25 bp, Homo sapiens
tcatgaggcagcaggtacactattt

SEQ ID NO: 7928 - DNA, 25 bp, Homo sapiens
tgtgtgtgtgcaggtacatatacac

SEQ ID NO: 7929 - DNA, 25 bp, Homo sapiens
tgcaaggctgggaaggcttccagaa

SEQ ID NO: 7930 - DNA, 25 bp, Homo sapiens
caggtggccaggtgtcatgcttagc

SEQ ID NO: 7931 - DNA, 25 bp, Homo sapiens
aatctgagcagggaagcggtgccga

SEQ ID NO: 7932 - DNA, 25 bp, Homo sapiens
tggtgcgtgggaccctccctgcaga

SEQ ID NO: 7933 - DNA, 25 bp, Homo sapiens
ctgtggctgagggacagtcatgact

SEQ ID NO: 7934 - DNA, 25 bp, Homo sapiens
gcaggccagggagcaagacttgatt

SEQ ID NO: 7935 - DNA, 25 bp, Homo sapiens
tggtatccggaaaagccacacgcaa

SEQ ID NO: 7936 - DNA, 25 bp, Homo sapiens
cgagttcgcggacacgcacgagacg

SEQ ID NO: 7937 - DNA, 25 bp, Homo sapiens
acttcccggacacagacacagatgc

SEQ ID NO: 7938 - DNA, 25 bp, Homo sapiens
tcgggcacggacagcgcaatggcat

SEQ ID NO: 7939 - DNA, 25 bp, Homo sapiens
cacacaccacggagaagatttggat

SEQ ID NO: 7940 - DNA, 25 bp, Homo sapiens
caccaattgcggacacaagctcatt

SEQ ID NO: 7941 - DNA, 25 bp, Homo sapiens
gcttcccggagagctgtggctgcat

SEQ ID NO: 7942 - DNA, 25 bp, Homo sapiens
gcctggagcggagaacggcgtttcc

SEQ ID NO: 7943 - DNA, 25 bp, Homo sapiens
ttgagcggcggagcattcacagtga

SEQ ID NO: 7944 - DNA, 25 bp, Homo sapiens
tagtcccggatgtgcttgaccacgt

SEQ ID NO: 7945 - DNA, 25 bp, Homo sapiens
gctgtgtgctgggatcacttcagag

SEQ ID NO: 7946 - DNA, 25 bp, Homo sapiens
tcgtggctgcggatgatatagtcca

SEQ ID NO: 7947 - DNA, 25 bp, Homo sapiens
tgcagcacatctcggatgggtccca

SEQ ID NO: 7948 - DNA, 25 bp, Homo sapiens
tgagaagaaggaccggacataccca

SEQ ID NO: 7949 - DNA, 25 bp, Homo sapiens
agggcaggaggacacaccttaggac

SEQ ID NO: 7950 - DNA, 25 bp, Homo sapiens
ggagaggaggaggcgacaagagaca

SEQ ID NO: 7951 - DNA, 25 bp, Homo sapiens
tcactccaaggaggctgcgtatggc

SEQ ID NO: 7952 - DNA, 25 bp, Homo sapiens
gacgacgaggaggagcagttcatcc

SEQ ID NO: 7953 - DNA, 25 bp, Homo sapiens
tggaggccaggaaatccaagattga

SEQ ID NO: 7954 - DNA, 25 bp, Homo sapiens
tggcgtccaggacacacacgttgaa

SEQ ID NO: 7955 - DNA, 25 bp, Homo sapiens
ctgtgaggcgcaggacttgcagact

SEQ ID NO: 7956 - DNA, 25 bp, Homo sapiens
tctggatgatgcaggactagaggca

SEQ ID NO: 7957 - DNA, 25 bp, Homo sapiens
gtcacacgcaggagcacagacacgt

SEQ ID NO: 7958 - DNA, 25 bp, Homo sapiens
aggtgtgtgcaggatcaattctttc

SEQ ID NO: 7959 - DNA, 25 bp, Homo sapiens
cacatgcgctccaggatcgagttca

SEQ ID NO: 7960 - DNA, 25 bp, Homo sapiens
tcttaagtggagtggtctaaccttc

SEQ ID NO: 7961 - DNA, 25 bp, Homo sapiens
caccaggttgggttcgtcatcctcc

SEQ ID NO: 7962 - DNA, 25 bp, Homo sapiens
gagtgtgttgggtcggccagtccag

SEQ ID NO: 7963 - DNA, 25 bp, Homo sapiens
tccctgtgtgggctgagttccggct

SEQ ID NO: 7964 - DNA, 25 bp, Homo sapiens
tggaaggtgggtcagcggcctggtt

SEQ ID NO: 7965 - DNA, 25 bp, Homo sapiens
ttcgctgtgtgggtgaggacatatc

SEQ ID NO: 7966 - DNA, 25 bp, Homo sapiens
cttgcttgcgtgggtgtatacatgc

SEQ ID NO: 7967 - DNA, 25 bp, Homo sapiens
tcgcaagtgtgggtgtgatgacact

SEQ ID NO: 7968 - DNA, 25 bp, Homo sapiens
tcatgagtgtgtgggtgcagacacc

SEQ ID NO: 7969 - DNA, 25 bp, Homo sapiens
tttccctgggtagctgcggtgagtt

SEQ ID NO: 7970 - DNA, 25 bp, Homo sapiens
cgcagcagtggtgggctaactcttc

SEQ ID NO: 7971 - DNA, 25 bp, Homo sapiens
ctgggtgcctgggacctcctgactg

SEQ ID NO: 7972 - DNA, 25 bp, Homo sapiens
tgcgctgagtgctgggcacgtcacc

SEQ ID NO: 7973 - DNA, 25 bp, Homo sapiens
aactgggctgggttgcgactgtacc

SEQ ID NO: 7974 - DNA, 25 bp, Homo sapiens
cttcgacttggttgcaatgggttcc

SEQ ID NO: 7975 - DNA, 25 bp, Homo sapiens
gctagtggctgggagcaagtcattc

SEQ ID NO: 7976 - DNA, 25 bp, Homo sapiens
cgccggcttggttttgaccttcgtg

SEQ ID NO: 7977 - DNA, 25 bp, Homo sapiens
agccgctggtggtccgtgtacacca

SEQ ID NO: 7978 - DNA, 25 bp, Homo sapiens
accagtgtgtggtcctgttaaacca

SEQ ID NO: 7979 - DNA, 25 bp, Homo sapiens
cagactgggtggtggctgggtagag

SEQ ID NO: 7980 - DNA, 25 bp, Homo sapiens
gcaagcaggtggtcaaggaaaataa

SEQ ID NO: 7981 - DNA, 25 bp, Homo sapiens
cctctctgcgtggttgctgatgctg

SEQ ID NO: 7982 - DNA, 25 bp, Homo sapiens
gctggtgtgtggtcctgtgaaattt

SEQ ID NO: 7983 - DNA, 25 bp, Homo sapiens
tggcgcgtgtggtgctaaactctac

SEQ ID NO: 7984 - DNA, 25 bp, Homo sapiens
tcttgcaggtggtgcaccatgagcg

SEQ ID NO: 7985 - DNA, 25 bp, Homo sapiens
cacttcgcagtggtgacaggcaacc

SEQ ID NO: 7986 - DNA, 25 bp, Homo sapiens
catgtatgtgcgtggtgtgtatatg

SEQ ID NO: 7987 - DNA, 25 bp, Homo sapiens
acaggtgcgtggtgctgcgggtgcc

SEQ ID NO: 7988 - DNA, 25 bp, Homo sapiens
tcctggctgctggtagtatgcccca

SEQ ID NO: 7989 - DNA, 25 bp, Homo sapiens
gatggcaggcatgggcgttgggtca

SEQ ID NO: 7990 - DNA, 25 bp, Homo sapiens
gctacactgctggtgctgacgggaa

SEQ ID NO: 7991 - DNA, 25 bp, Homo sapiens
cataagtgtgctggtgggagctctc

SEQ ID NO: 7992 - DNA, 25 bp, Homo sapiens
tctgctccctggtgtgggtgctctg

SEQ ID NO: 7993 - DNA, 25 bp, Homo sapiens
tgcctcggctggtgtgcagaaaagc

SEQ ID NO: 7994 - DNA, 25 bp, Homo sapiens
tcatggttatgggtggctggtcccc

SEQ ID NO: 7995 - DNA, 25 bp, Homo sapiens
aattcgtgctggtgctagggcttac

SEQ ID NO: 7996 - DNA, 25 bp, Homo sapiens
aacatcgactggtgctggtgggcca

SEQ ID NO: 7997 - DNA, 25 bp, Homo sapiens
taaaggctggtgcttccaggagcgt

SEQ ID NO: 7998 - DNA, 25 bp, Homo sapiens
atgtatatatatgggtgtgcatgtg

SEQ ID NO: 7999 - DNA, 25 bp, Homo sapiens
cctcatgaacatgggtggctgctgt

SEQ ID NO: 8000 - DNA, 25 bp, Homo sapiens
gatcgacgatggtgcctcctagttg

SEQ ID NO: 8001 - DNA, 25 bp, Homo sapiens
ccagcttgtgatggtggtgatgtca

SEQ ID NO: 8002 - DNA, 25 bp, Homo sapiens
gcacgcacttggactggattcacag

SEQ ID NO: 8003 - DNA, 25 bp, Homo sapiens
ggctctggtggactagcgcctccgc

SEQ ID NO: 8004 - DNA, 25 bp, Homo sapiens
tggtgttgtggagacataaccttgc

SEQ ID NO: 8005 - DNA, 25 bp, Homo sapiens
tctggcggtggagaagtcaaagatc

SEQ ID NO: 8006 - DNA, 25 bp, Homo sapiens
aatgcaggagtggagtgatccaccg

SEQ ID NO: 8007 - DNA, 25 bp, Homo sapiens
tggcagcagttggagccacagctct

SEQ ID NO: 8008 - DNA, 25 bp, Homo sapiens
agaatacttggagcgacacacacag

SEQ ID NO: 8009 - DNA, 25 bp, Homo sapiens
ccctccgtggagagcggctgcgact

SEQ ID NO: 8010 - DNA, 25 bp, Homo sapiens
caggctgggctggaacgaaatttga

SEQ ID NO: 8011 - DNA, 25 bp, Homo sapiens
gaaatactggaaggccttggacttc

SEQ ID NO: 8012 - DNA, 25 bp, Homo sapiens
tagcacacagctggaaccgaaattc

SEQ ID NO: 8013 - DNA, 25 bp, Homo sapiens
ggctgtgcctggacctcaagagtca

SEQ ID NO: 8014 - DNA, 25 bp, Homo sapiens
cagctgcgtggctggacagttaaga

SEQ ID NO: 8015 - DNA, 25 bp, Homo sapiens
tataaatctggagttggcctgccct

SEQ ID NO: 8016 - DNA, 25 bp, Homo sapiens
tgaaacagctggagcagcggtgact

SEQ ID NO: 8017 - DNA, 25 bp, Homo sapiens
atccaggtgctggacgggctcttcc

SEQ ID NO: 8018 - DNA, 25 bp, Homo sapiens
gcgtgggtggatggcattccatatt

SEQ ID NO: 8019 - DNA, 25 bp, Homo sapiens
aaagcggctggagggtcccaaagtg

SEQ ID NO: 8020 - DNA, 25 bp, Homo sapiens
accccgtggatatggagcagtcgcc

SEQ ID NO: 8021 - DNA, 25 bp, Homo sapiens
tggcgacgatggagaagccttcctc

SEQ ID NO: 8022 - DNA, 25 bp, Homo sapiens
cacaggatggatggaaactttccac

SEQ ID NO: 8023 - DNA, 25 bp, Homo sapiens
catggagtggatggagcaagcttct

SEQ ID NO: 8024 - DNA, 25 bp, Homo sapiens
gcagtgggcggcgcatccctcacag

SEQ ID NO: 8025 - DNA, 25 bp, Homo sapiens
tgcgggccggcgcggtcgggcccga

SEQ ID NO: 8026 - DNA, 25 bp, Homo sapiens
aacatgaccatggaggcagcaggct

SEQ ID NO: 8027 - DNA, 25 bp, Homo sapiens
tcttacgggccggctggttgaacca

SEQ ID NO: 8028 - DNA, 25 bp, Homo sapiens
gagtgtggtggcgccatcatagttc

SEQ ID NO: 8029 - DNA, 25 bp, Homo sapiens
ctcaggaagggcctaggttccagta

SEQ ID NO: 8030 - DNA, 25 bp, Homo sapiens
tgattttgggcccaggcagggaccc

SEQ ID NO: 8031 - DNA, 25 bp, Homo sapiens
gccaaagggccagcggtattccata

SEQ ID NO: 8032 - DNA, 25 bp, Homo sapiens
tgagggcagggccatctttccgtgc

SEQ ID NO: 8033 - DNA, 25 bp, Homo sapiens
gcttggctgggcctggcagatctgg

SEQ ID NO: 8034 - DNA, 25 bp, Homo sapiens
ggaaccggccgtgcacacactgcag

SEQ ID NO: 8035 - DNA, 25 bp, Homo sapiens
aagcgcggcggctagatgtagggaa

SEQ ID NO: 8036 - DNA, 25 bp, Homo sapiens
cggcgcgtgcggcgccgcggaccgg

SEQ ID NO: 8037 - DNA, 25 bp, Homo sapiens
acaagcggcggcgtgtaggcctcct

SEQ ID NO: 8038 - DNA, 25 bp, Homo sapiens
taaggacggcggcgcctttatatgg

SEQ ID NO: 8039 - DNA, 25 bp, Homo sapiens
accagggcggcgtccagatggttct

SEQ ID NO: 8040 - DNA, 25 bp, Homo sapiens
cggcggccggcgacactgagttcat

SEQ ID NO: 8041 - DNA, 25 bp, Homo sapiens
ggcgggcggccccgtcgcggcggcg

SEQ ID NO: 8042 - DNA, 25 bp, Homo sapiens
gaggggcggccggtcgcggcgggcg

SEQ ID NO: 8043 - DNA, 25 bp, Homo sapiens
aggaccagggcttgtacagtcctgg

SEQ ID NO: 8044 - DNA, 25 bp, Homo sapiens
gtgatggcagggctacgctccctct

SEQ ID NO: 8045 - DNA, 25 bp, Homo sapiens
aggacctgggctgagttgtatacgg

SEQ ID NO: 8046 - DNA, 25 bp, Homo sapiens
tgtgactgtgggctacctacatcag

SEQ ID NO: 8047 - DNA, 25 bp, Homo sapiens
tcgggctgggctctgctaattatct

SEQ ID NO: 8048 - DNA, 25 bp, Homo sapiens
gaggcacagggctaattgtctcttt

SEQ ID NO: 8049 - DNA, 25 bp, Homo sapiens
cacagggctgggcttcgttgcacgt

SEQ ID NO: 8050 - DNA, 25 bp, Homo sapiens
cccagtcgggctcgcgcttgagcag

SEQ ID NO: 8051 - DNA, 25 bp, Homo sapiens
taggctgcgggctgttctccttagc

SEQ ID NO: 8052 - DNA, 25 bp, Homo sapiens
cccctgtgggctgtggcatccgtga

SEQ ID NO: 8053 - DNA, 25 bp, Homo sapiens
ctttggcagggctgaaaatttgatc

SEQ ID NO: 8054 - DNA, 25 bp, Homo sapiens
acgaggctgggctagatgaatatcc

SEQ ID NO: 8055 - DNA, 25 bp, Homo sapiens
tggacctgggctggatccttaggct

SEQ ID NO: 8056 - DNA, 25 bp, Homo sapiens
gaccactgggctcaagattctcttc

SEQ ID NO: 8057 - DNA, 25 bp, Homo sapiens
gcctcaggcggctgtttccaaaggt

SEQ ID NO: 8058 - DNA, 25 bp, Homo sapiens
ctgtgtgtcgggctgtgtgcaaaac

SEQ ID NO: 8059 - DNA, 25 bp, Homo sapiens
gtggtggcggcttccaagtctccag

SEQ ID NO: 8060 - DNA, 25 bp, Homo sapiens
gggtgctgcggctgctcgtccactt

SEQ ID NO: 8061 - DNA, 25 bp, Homo sapiens
gaacgatgcggctgttggtacgaca

SEQ ID NO: 8062 - DNA, 25 bp, Homo sapiens
aaaggtgcggctctgtgccaactca

SEQ ID NO: 8063 - DNA, 25 bp, Homo sapiens
gtcattctcggctgctgtgcgtttg

SEQ ID NO: 8064 - DNA, 25 bp, Homo sapiens
tatttgcaaggccaccaaacaaggt

SEQ ID NO: 8065 - DNA, 25 bp, Homo sapiens
gccttgtcggctgctgctaaggaca

SEQ ID NO: 8066 - DNA, 25 bp, Homo sapiens
tgatagacgcggctgcggtactcag

SEQ ID NO: 8067 - DNA, 25 bp, Homo sapiens
cagggaagaggccacgagatagtca

SEQ ID NO: 8068 - DNA, 25 bp, Homo sapiens
gggcgctaggccacggagcccattt

SEQ ID NO: 8069 - DNA, 25 bp, Homo sapiens
agaagtaaggctgcgcccatgcaag

SEQ ID NO: 8070 - DNA, 25 bp, Homo sapiens
caagtgatgctgcaggcctggtcct

SEQ ID NO: 8071 - DNA, 25 bp, Homo sapiens
gcaggagcgaggctagtcaccttaa

SEQ ID NO: 8072 - DNA, 25 bp, Homo sapiens
ggttgctgaggctccaagatatcct

SEQ ID NO: 8073 - DNA, 25 bp, Homo sapiens
taatgaggaggctatttcccaggag

SEQ ID NO: 8074 - DNA, 25 bp, Homo sapiens
aggcgagagggcagggaagcgtctg

SEQ ID NO: 8075 - DNA, 25 bp, Homo sapiens
tctgtggtgggcatggctacccctg

SEQ ID NO: 8076 - DNA, 25 bp, Homo sapiens
gactgagtgggcacaaaatggtgtc

SEQ ID NO: 8077 - DNA, 25 bp, Homo sapiens
gccacaacggcaacaccaagcaaga

SEQ ID NO: 8078 - DNA, 25 bp, Homo sapiens
tatagagcagggcagatagatccag

SEQ ID NO: 8079 - DNA, 25 bp, Homo sapiens
cggccggcggcagaattcatcctgt

SEQ ID NO: 8080 - DNA, 25 bp, Homo sapiens
tggccggcggcagaattcatcctgt

SEQ ID NO: 8081 - DNA, 25 bp, Homo sapiens
ggtcggcggcattcccaccaggact

SEQ ID NO: 8082 - DNA, 25 bp, Homo sapiens
ctgtgttctgggcatccccaaggga

SEQ ID NO: 8083 - DNA, 25 bp, Homo sapiens
ccaggcagagggcataaagggacct

SEQ ID NO: 8084 - DNA, 25 bp, Homo sapiens
atcacacttaggcacaaacaccaaa

SEQ ID NO: 8085 - DNA, 25 bp, Homo sapiens
caaaggtgaggcaggtgttgcatca

SEQ ID NO: 8086 - DNA, 25 bp, Homo sapiens
gggcaggaggcacagatattatcct

SEQ ID NO: 8087 - DNA, 25 bp, Homo sapiens
tcctgagagaggcaactcggtccag

SEQ ID NO: 8088 - DNA, 25 bp, Homo sapiens
taccttgaggcagtgtggccacctg

SEQ ID NO: 8089 - DNA, 25 bp, Homo sapiens
gaaccacaggcaccgtgagttctct

SEQ ID NO: 8090 - DNA, 25 bp, Homo sapiens
acccgccatggccccaaccacacac

SEQ ID NO: 8091 - DNA, 25 bp, Homo sapiens
aactaccaggcatacaaatcagcag

SEQ ID NO: 8092 - DNA, 25 bp, Homo sapiens
ggtcatgccaggcacacactgctgc

SEQ ID NO: 8093 - DNA, 25 bp, Homo sapiens
cgctcacaggcaggcacacgtgagc

SEQ ID NO: 8094 - DNA, 25 bp, Homo sapiens
tccgtcgtggcctggcgtggattcc

SEQ ID NO: 8095 - DNA, 25 bp, Homo sapiens
cgttttgtggccacacccacagcaa

SEQ ID NO: 8096 - DNA, 25 bp, Homo sapiens
gacctttggcttggcttgtcagggc

SEQ ID NO: 8097 - DNA, 25 bp, Homo sapiens
ttaagtgtggccgttccgctctgtc

SEQ ID NO: 8098 - DNA, 25 bp, Homo sapiens
ctgggtggtggctgggtagagatgc

SEQ ID NO: 8099 - DNA, 25 bp, Homo sapiens
gctgctgcaggtggcgacactcagt

SEQ ID NO: 8100 - DNA, 25 bp, Homo sapiens
tggtgccgtggctaaagagaaagaa

SEQ ID NO: 8101 - DNA, 25 bp, Homo sapiens
tcagtccgtggctggagtagagaca

SEQ ID NO: 8102 - DNA, 25 bp, Homo sapiens
aaaacttggcttggcgttcttgagg

SEQ ID NO: 8103 - DNA, 25 bp, Homo sapiens
aggctggcttggctgctgcgaatcc

SEQ ID NO: 8104 - DNA, 25 bp, Homo sapiens
acaggtggtggctattattattagc

SEQ ID NO: 8105 - DNA, 25 bp, Homo sapiens
catggcctggatggcggtctgcgcg

SEQ ID NO: 8106 - DNA, 25 bp, Homo sapiens
caggcagggtggctaagagccttcc

SEQ ID NO: 8107 - DNA, 25 bp, Homo sapiens
cgcggctgcagtggctgttcgccaa

SEQ ID NO: 8108 - DNA, 25 bp, Homo sapiens
gatgtggctgctggcttcattctgt

SEQ ID NO: 8109 - DNA, 25 bp, Homo sapiens
gaggcggtggctccaatatgatcca

SEQ ID NO: 8110 - DNA, 25 bp, Homo sapiens
taactgcttggctggtgatgccaga

SEQ ID NO: 8111 - DNA, 25 bp, Homo sapiens
tccatttgtggctgcgttgtcccca

SEQ ID NO: 8112 - DNA, 25 bp, Homo sapiens
tcacttgcgtggctgctggatgtgc

SEQ ID NO: 8113 - DNA, 25 bp, Homo sapiens
taaactgtggctgctggctaaccta

SEQ ID NO: 8114 - DNA, 25 bp, Homo sapiens
gccagttgtggctgcgaggccatca

SEQ ID NO: 8115 - DNA, 25 bp, Homo sapiens
ataaaatctggctcacacacacaac

SEQ ID NO: 8116 - DNA, 25 bp, Homo sapiens
gcaaaggtggctgctctcaacagct

SEQ ID NO: 8117 - DNA, 25 bp, Homo sapiens
gccccaatggcaaacacagaaggaa

SEQ ID NO: 8118 - DNA, 25 bp, Homo sapiens
tcggcggtggcaaatggcggctcct

SEQ ID NO: 8119 - DNA, 25 bp, Homo sapiens
gggtccatggctgagtgcattatag

SEQ ID NO: 8120 - DNA, 25 bp, Homo sapiens
gtctcggtggcagtgcagccatagc

SEQ ID NO: 8121 - DNA, 25 bp, Homo sapiens
tggctgctctgtggcaccaacatct

SEQ ID NO: 8122 - DNA, 25 bp, Homo sapiens
tctatgcggtggcacgaggctgcct

SEQ ID NO: 8123 - DNA, 25 bp, Homo sapiens
cattggtggctggcaagacctttga

SEQ ID NO: 8124 - DNA, 25 bp, Homo sapiens
tgggagtgctggcatttcctaggac

SEQ ID NO: 8125 - DNA, 25 bp, Homo sapiens
gaaggaccccacagccaaactgaaa

SEQ ID NO: 8126 - DNA, 25 bp, Homo sapiens
gtggtgaccccgtggtggcagcgtg

SEQ ID NO: 8127 - DNA, 25 bp, Homo sapiens
cattcccatccccttgaggaagtgg

SEQ ID NO: 8128 - DNA, 25 bp, Homo sapiens
agcatctgcatcagccccgacatga

SEQ ID NO: 8129 - DNA, 25 bp, Homo sapiens
ggcctacccggctgctggaaattag

SEQ ID NO: 8130 - DNA, 25 bp, Homo sapiens
gccacacagcccctgcagattgaag

SEQ ID NO: 8131 - DNA, 25 bp, Homo sapiens
gtatttcccggtgtgtggcgtgaca

SEQ ID NO: 8132 - DNA, 25 bp, Homo sapiens
actcacacgcccgcacccacgcagg

SEQ ID NO: 8133 - DNA, 25 bp, Homo sapiens
tgcaccacacccttccatggtaggt

SEQ ID NO: 8134 - DNA, 25 bp, Homo sapiens
aacacacacccttcagaatgactca

SEQ ID NO: 8135 - DNA, 25 bp, Homo sapiens
ggtgatgcccctccctaatgaacaa

SEQ ID NO: 8136 - DNA, 25 bp, Homo sapiens
tggcacgtcccagtatttacggacc

SEQ ID NO: 8137 - DNA, 25 bp, Homo sapiens
gggtctccctcataaagtgcgtgtg

SEQ ID NO: 8138 - DNA, 25 bp, Homo sapiens
tgcaccctgccctgtgcggttggat

SEQ ID NO: 8139 - DNA, 25 bp, Homo sapiens
taacgtgccctgtgttttctggaca

SEQ ID NO: 8140 - DNA, 25 bp, Homo sapiens
gatttcaccctgcaacacattcagt

SEQ ID NO: 8141 - DNA, 25 bp, Homo sapiens
taaaagccctgtgtggatgtggtaa

SEQ ID NO: 8142 - DNA, 25 bp, Homo sapiens
acacactaacccacccattcactaa

SEQ ID NO: 8143 - DNA, 25 bp, Homo sapiens
cggagccaacccagccaagaagaag

SEQ ID NO: 8144 - DNA, 25 bp, Homo sapiens
ccacagaaacccacacagtagtgtc

SEQ ID NO: 8145 - DNA, 25 bp, Homo sapiens
tgcacgcaaaccctaacacggagga

SEQ ID NO: 8146 - DNA, 25 bp, Homo sapiens
tccgtctaccaccactttgaaaaga

SEQ ID NO: 8147 - DNA, 25 bp, Homo sapiens
cagaagagaacccaccacctggaag

SEQ ID NO: 8148 - DNA, 25 bp, Homo sapiens
gtgggtgacccattccaccagaggt

SEQ ID NO: 8149 - DNA, 25 bp, Homo sapiens
accccagacccagtaagtcagaatc

SEQ ID NO: 8150 - DNA, 25 bp, Homo sapiens
gattccacacccaagccgataaaga

SEQ ID NO: 8151 - DNA, 25 bp, Homo sapiens
gccaacacacccagagtgcaatgga

SEQ ID NO: 8152 - DNA, 25 bp, Homo sapiens
ggatgaacaccccacacattagggc

SEQ ID NO: 8153 - DNA, 25 bp, Homo sapiens
acactcacacaacgggctgataaga

SEQ ID NO: 8154 - DNA, 25 bp, Homo sapiens
taaaacacccagcacgcaacatggt

SEQ ID NO: 8155 - DNA, 25 bp, Homo sapiens
taagcaacacccgaaaaggcagcgg

SEQ ID NO: 8156 - DNA, 25 bp, Homo sapiens
ttcaagccacccatataaactgcgt

SEQ ID NO: 8157 - DNA, 25 bp, Homo sapiens
tagaccgcacccagcatagagatgg

SEQ ID NO: 8158 - DNA, 25 bp, Homo sapiens
caagccaccaccgaaagttctgagc

SEQ ID NO: 8159 - DNA, 25 bp, Homo sapiens
cacacgcaagcaccggatgagtcgg

SEQ ID NO: 8160 - DNA, 25 bp, Homo sapiens
gaaagacacccaggataggacgaca

SEQ ID NO: 8161 - DNA, 25 bp, Homo sapiens
gaacacacacccctgacttttgttg

SEQ ID NO: 8162 - DNA, 25 bp, Homo sapiens
ggccacacaccctgcgtttcagaag

SEQ ID NO: 8163 - DNA, 25 bp, Homo sapiens
tacagacacacccagactgacgtag

SEQ ID NO: 8164 - DNA, 25 bp, Homo sapiens
acacctgcaacctagctactaggga

SEQ ID NO: 8165 - DNA, 25 bp, Homo sapiens
tctcatcacacaccggtagctcagg

SEQ ID NO: 8166 - DNA, 25 bp, Homo sapiens
cacaaccacacctagggatgctttt

SEQ ID NO: 8167 - DNA, 25 bp, Homo sapiens
gaggaaacctaccagccaacaggca

SEQ ID NO: 8168 - DNA, 25 bp, Homo sapiens
tgccacaccaccttgggaagaagcc

SEQ ID NO: 8169 - DNA, 25 bp, Homo sapiens
taccaccacctttatcagatgtcaa

SEQ ID NO: 8170 - DNA, 25 bp, Homo sapiens
gcacacgcgcacctacgtaacgaac

SEQ ID NO: 8171 - DNA, 25 bp, Homo sapiens
tagcactcacacctaggttccaagg

SEQ ID NO: 8172 - DNA, 25 bp, Homo sapiens
cccacaccacctagaagttgctatg

SEQ ID NO: 8173 - DNA, 25 bp, Homo sapiens
gctgtcaccacctcagggttgtaca

SEQ ID NO: 8174 - DNA, 25 bp, Homo sapiens
gcagtgctcacacctctagtatgat

SEQ ID NO: 8175 - DNA, 25 bp, Homo sapiens
aaacacacacctgcaagatttactg

SEQ ID NO: 8176 - DNA, 25 bp, Homo sapiens
gctgctgtggcaccttcttgttcca

SEQ ID NO: 8177 - DNA, 25 bp, Homo sapiens
gcaccaccccaagcacagtggagta

SEQ ID NO: 8178 - DNA, 25 bp, Homo sapiens
gagaaccccaaccacgcatggattg

SEQ ID NO: 8179 - DNA, 25 bp, Homo sapiens
tgtgataacccaccaccattggacc

SEQ ID NO: 8180 - DNA, 25 bp, Homo sapiens
atgagaaccccacgcaccagaatga

SEQ ID NO: 8181 - DNA, 25 bp, Homo sapiens
ctgtgataacccaccaccattggac

SEQ ID NO: 8182 - DNA, 25 bp, Homo sapiens
tcaggccacccactatgcagtaaat

SEQ ID NO: 8183 - DNA, 25 bp, Homo sapiens
tggacacacccaacacagaaggagg

SEQ ID NO: 8184 - DNA, 25 bp, Homo sapiens
gagccttcccaagcatgaaaataaa

SEQ ID NO: 8185 - DNA, 25 bp, Homo sapiens
gtaaccccacagacacgtcagtcaa

SEQ ID NO: 8186 - DNA, 25 bp, Homo sapiens
gtggattcccacaccaacatgggca

SEQ ID NO: 8187 - DNA, 25 bp, Homo sapiens
tgtgtgtgtgcccaccagtggagac

SEQ ID NO: 8188 - DNA, 25 bp, Homo sapiens
aaatagcacccacactgaaataaag

SEQ ID NO: 8189 - DNA, 25 bp, Homo sapiens
gttagtgcccacaaccacagacttg

SEQ ID NO: 8190 - DNA, 25 bp, Homo sapiens
aggtacgcccacaaacattacaggg

SEQ ID NO: 8191 - DNA, 25 bp, Homo sapiens
tgcacagacgcccacctgttttggc

SEQ ID NO: 8192 - DNA, 25 bp, Homo sapiens
caaataggcccaaacacgtaatggg

SEQ ID NO: 8193 - DNA, 25 bp, Homo sapiens
ggatggagcccaacaccagaaagat

SEQ ID NO: 8194 - DNA, 25 bp, Homo sapiens
taagccacccagtatatagtcattt

SEQ ID NO: 8195 - DNA, 25 bp, Homo sapiens
ataggcaccccagccatggagcact

SEQ ID NO: 8196 - DNA, 25 bp, Homo sapiens
ggtctgtgcccagaaaggagactca

SEQ ID NO: 8197 - DNA, 25 bp, Homo sapiens
gaagaccgccataaccacggagaag

SEQ ID NO: 8198 - DNA, 25 bp, Homo sapiens
cagagccatgcacccatttatctgc

SEQ ID NO: 8199 - DNA, 25 bp, Homo sapiens
acacacaccccatcatctggtgaga

SEQ ID NO: 8200 - DNA, 25 bp, Homo sapiens
ggctgctggcccattgctgcatgat

SEQ ID NO: 8201 - DNA, 25 bp, Homo sapiens
ttcaggcaaccacccagaaacacat

SEQ ID NO: 8202 - DNA, 25 bp, Homo sapiens
accacacaaccacgtgatcatcaat

SEQ ID NO: 8203 - DNA, 25 bp, Homo sapiens
ttgtaaaccaccaccacattagctt

SEQ ID NO: 8204 - DNA, 25 bp, Homo sapiens
ttgacaaaccaaccagaactgtgga

SEQ ID NO: 8205 - DNA, 25 bp, Homo sapiens
tatgtggcaaccaaacacaaccagg

SEQ ID NO: 8206 - DNA, 25 bp, Homo sapiens
caagaagcaaccaaaacagtcagtg

SEQ ID NO: 8207 - DNA, 25 bp, Homo sapiens
taagcagcaaccacacactgggaaa

SEQ ID NO: 8208 - DNA, 25 bp, Homo sapiens
gccgaataccacacactgtgacaca

SEQ ID NO: 8209 - DNA, 25 bp, Homo sapiens
tacaaaaccacatcacaaccgctag

SEQ ID NO: 8210 - DNA, 25 bp, Homo sapiens
tagggtgaccaaccagccgagtttc

SEQ ID NO: 8211 - DNA, 25 bp, Homo sapiens
caatgaaaaccagccaaccttgctg

SEQ ID NO: 8212 - DNA, 25 bp, Homo sapiens
aaatgccacaccaaccactacagag

SEQ ID NO: 8213 - DNA, 25 bp, Homo sapiens
acggccaaccagtccacaaagagct

SEQ ID NO: 8214 - DNA, 25 bp, Homo sapiens
aaccaccaccacattagcttagata

SEQ ID NO: 8215 - DNA, 25 bp, Homo sapiens
gtgacacagaccagacgcaggcttt

SEQ ID NO: 8216 - DNA, 25 bp, Homo sapiens
gatgcctccaccaccattaaggaag

SEQ ID NO: 8217 - DNA, 25 bp, Homo sapiens
gttgcaacaccaccacgaggaagtt

SEQ ID NO: 8218 - DNA, 25 bp, Homo sapiens
cagaccaccaccactatattgtagg

SEQ ID NO: 8219 - DNA, 25 bp, Homo sapiens
tgtacagagaccagagaccaacgtt

SEQ ID NO: 8220 - DNA, 25 bp, Homo sapiens
tgttctcgcaccaaactccctgggt

SEQ ID NO: 8221 - DNA, 25 bp, Homo sapiens
cacaacccaccaccatgggagtctg

SEQ ID NO: 8222 - DNA, 25 bp, Homo sapiens
cacccaccaccaacagatgagtatg

SEQ ID NO: 8223 - DNA, 25 bp, Homo sapiens
tgtcagccacaccaaagaaggaata

SEQ ID NO: 8224 - DNA, 25 bp, Homo sapiens
tatgccacacaccagggaaagtagt

SEQ ID NO: 8225 - DNA, 25 bp, Homo sapiens
tcacccacaccagacagttgaggtt

SEQ ID NO: 8226 - DNA, 25 bp, Homo sapiens
ttctgagacaccacacagtcttggt

SEQ ID NO: 8227 - DNA, 25 bp, Homo sapiens
aaagccacaccactacggaagagga

SEQ ID NO: 8228 - DNA, 25 bp, Homo sapiens
gagcggccaccacaactctggaatg

SEQ ID NO: 8229 - DNA, 25 bp, Homo sapiens
caaccaccaccaccttggagagttt

SEQ ID NO: 8230 - DNA, 25 bp, Homo sapiens
caggaatacaccacaccagggaggt

SEQ ID NO: 8231 - DNA, 25 bp, Homo sapiens
agcgaacacaccaaggataatttct

SEQ ID NO: 8232 - DNA, 25 bp, Homo sapiens
caacctcacaccaggaagctttgat

SEQ ID NO: 8233 - DNA, 25 bp, Homo sapiens
agcacgaacaccaccgcagacaagg

SEQ ID NO: 8234 - DNA, 25 bp, Homo sapiens
ggaaggcaccaacactcagaaagat

SEQ ID NO: 8235 - DNA, 25 bp, Homo sapiens
gaggtgacaccacaaccatctcggt

SEQ ID NO: 8236 - DNA, 25 bp, Homo sapiens
catgctggaccaccacactgggttg

SEQ ID NO: 8237 - DNA, 25 bp, Homo sapiens
atcatatgacatcaccaccagtagg

SEQ ID NO: 8238 - DNA, 25 bp, Homo sapiens
taagatgcacaccacatcctctgtg

SEQ ID NO: 8239 - DNA, 25 bp, Homo sapiens
taggcagcacaccacagcagagtgt

SEQ ID NO: 8240 - DNA, 25 bp, Homo sapiens
cagagagttcaccacaccgcgaagt

SEQ ID NO: 8241 - DNA, 25 bp, Homo sapiens
cagacactgcgcaccaagataaaga

SEQ ID NO: 8242 - DNA, 25 bp, Homo sapiens
gacaagagcaccaccattggactgg

SEQ ID NO: 8243 - DNA, 25 bp, Homo sapiens
acccacagcaccatgggagagaggc

SEQ ID NO: 8244 - DNA, 25 bp, Homo sapiens
ttaatgtcaccagccaaggatgagg

SEQ ID NO: 8245 - DNA, 25 bp, Homo sapiens
cacagcacaatgcaccaggatcttc

SEQ ID NO: 8246 - DNA, 25 bp, Homo sapiens
tcctcaccaccagcagtgatggcgt

SEQ ID NO: 8247 - DNA, 25 bp, Homo sapiens
cgtggtgctgaccatatggacgttg

SEQ ID NO: 8248 - DNA, 25 bp, Homo sapiens
gctacccaccatcgccagacgcaga

SEQ ID NO: 8249 - DNA, 25 bp, Homo sapiens
gatggcagttccctcacacactgat

SEQ ID NO: 8250 - DNA, 25 bp, Homo sapiens
caccagggtcccgtggtgctgctgt

SEQ ID NO: 8251 - DNA, 25 bp, Homo sapiens
tcaataggtcccatggtggagtccc

SEQ ID NO: 8252 - DNA, 25 bp, Homo sapiens
ggtgtgcgtcccttgctttagaaga

SEQ ID NO: 8253 - DNA, 25 bp, Homo sapiens
gaagctttccggaagcaccttgtac

SEQ ID NO: 8254 - DNA, 25 bp, Homo sapiens
aatcggcttccggtggtgctggctc

SEQ ID NO: 8255 - DNA, 25 bp, Homo sapiens
cgtgtgcagcttccgtgatgcagtt

SEQ ID NO: 8256 - DNA, 25 bp, Homo sapiens
tgagcacgcactcccctgtgaagat

SEQ ID NO: 8257 - DNA, 25 bp, Homo sapiens
tggcgttctcccaggcgtgacgcgt

SEQ ID NO: 8258 - DNA, 25 bp, Homo sapiens
acatcttgggccgggaggtcttgtt

SEQ ID NO: 8259 - DNA, 25 bp, Homo sapiens
gggttctccctcttcagctgagcat

SEQ ID NO: 8260 - DNA, 25 bp, Homo sapiens
atctgcgcggctccgtggccgaaag

SEQ ID NO: 8261 - DNA, 25 bp, Homo sapiens
tgtgggcgtcctccaagatcttgcg

SEQ ID NO: 8262 - DNA, 25 bp, Homo sapiens
atgctgatgccgtcctagaatccat

SEQ ID NO: 8263 - DNA, 25 bp, Homo sapiens
cgtacttgtcctctgctgctgacag

SEQ ID NO: 8264 - DNA, 25 bp, Homo sapiens
tcaaaggtcctggaacttgtcagtg

SEQ ID NO: 8265 - DNA, 25 bp, Homo sapiens
cctgaacgtcctggcgaaggtaacg

SEQ ID NO: 8266 - DNA, 25 bp, Homo sapiens
ccaaacttcctgcaagtgcttgcta

SEQ ID NO: 8267 - DNA, 25 bp, Homo sapiens
ggagagactcctaacacaacacaga

SEQ ID NO: 8268 - DNA, 25 bp, Homo sapiens
gtctgtgtgctcctgaaacaagcac

SEQ ID NO: 8269 - DNA, 25 bp, Homo sapiens
agcggcggctcctcaacatggcagc

SEQ ID NO: 8270 - DNA, 25 bp, Homo sapiens
acacacacacatcctgctgtggact

SEQ ID NO: 8271 - DNA, 25 bp, Homo sapiens
gaaagtgatcctgtctcggcagcag

SEQ ID NO: 8272 - DNA, 25 bp, Homo sapiens
cttggtgtgtccaattttgtattca

SEQ ID NO: 8273 - DNA, 25 bp, Homo sapiens
gtgctggcttccacgatgtagtcca

SEQ ID NO: 8274 - DNA, 25 bp, Homo sapiens
ctgaggctgctgtccaatgctgagc

SEQ ID NO: 8275 - DNA, 25 bp, Homo sapiens
tcatgacacgctccaccactaattt

SEQ ID NO: 8276 - DNA, 25 bp, Homo sapiens
ggactgcctccaaaacaacacaagg

SEQ ID NO: 8277 - DNA, 25 bp, Homo sapiens
tggcgtggtccagctccacgttggc

SEQ ID NO: 8278 - DNA, 25 bp, Homo sapiens
gtatccagctccaaagcacacacag

SEQ ID NO: 8279 - DNA, 25 bp, Homo sapiens
aggctggctgctccaaacaggctgc

SEQ ID NO: 8280 - DNA, 25 bp, Homo sapiens
aggtcaagctccaccacgcagatga

SEQ ID NO: 8281 - DNA, 25 bp, Homo sapiens
gaggcggtccattctgcataaaata

SEQ ID NO: 8282 - DNA, 25 bp, Homo sapiens
cagtagagtctccaggctctggtca

SEQ ID NO: 8283 - DNA, 25 bp, Homo sapiens
gtcttgaatccaaagcacgcactct

SEQ ID NO: 8284 - DNA, 25 bp, Homo sapiens
cagttgctgtgctccatgagggcca

SEQ ID NO: 8285 - DNA, 25 bp, Homo sapiens
tgtcttcaatccacaccacggaggg

SEQ ID NO: 8286 - DNA, 25 bp, Homo sapiens
ccagatcacatcatccaaccaaggg

SEQ ID NO: 8287 - DNA, 25 bp, Homo sapiens
agcactcacacatccacgtgaatgc

SEQ ID NO: 8288 - DNA, 25 bp, Homo sapiens
ttcaacggcccagacaggcacatgt

SEQ ID NO: 8289 - DNA, 25 bp, Homo sapiens
tggctggcggcccttccggatgaat

SEQ ID NO: 8290 - DNA, 25 bp, Homo sapiens
aggccgggcccggtgcgcggcggcg

SEQ ID NO: 8291 - DNA, 25 bp, Homo sapiens
tggcggcggcccgaccgtacacacc

SEQ ID NO: 8292 - DNA, 25 bp, Homo sapiens
ggctttggcccagagcacggttctg

SEQ ID NO: 8293 - DNA, 25 bp, Homo sapiens
tcgacaccgcccatttggagggaaa

SEQ ID NO: 8294 - DNA, 25 bp, Homo sapiens
acttcttggccggaggcatcgccgc

SEQ ID NO: 8295 - DNA, 25 bp, Homo sapiens
gtggcgaggccctaggagacctccc

SEQ ID NO: 8296 - DNA, 25 bp, Homo sapiens
gaagcgaggcccatgttgctgctgt

SEQ ID NO: 8297 - DNA, 25 bp, Homo sapiens
tcttcctggccctcgggttcaagca

SEQ ID NO: 8298 - DNA, 25 bp, Homo sapiens
cgcgggcggccgtcgcgcgcggcgc

SEQ ID NO: 8299 - DNA, 25 bp, Homo sapiens
gagagctacgccgcacgatacaggc

SEQ ID NO: 8300 - DNA, 25 bp, Homo sapiens
agctgtacggcctggcttggcaagc

SEQ ID NO: 8301 - DNA, 25 bp, Homo sapiens
tgggatgctggccttgacggaccac

SEQ ID NO: 8302 - DNA, 25 bp, Homo sapiens
cacgatggcggccttgggcagccct

SEQ ID NO: 8303 - DNA, 25 bp, Homo sapiens
agagtgcgggcctcacacaccagat

SEQ ID NO: 8304 - DNA, 25 bp, Homo sapiens
tggactagcgcctccgcaggcctgg

SEQ ID NO: 8305 - DNA, 25 bp, Homo sapiens
ggctgctgtggcctacacacctggg

SEQ ID NO: 8306 - DNA, 25 bp, Homo sapiens
ctggagtctggcctctcagagccga

SEQ ID NO: 8307 - DNA, 25 bp, Homo sapiens
tcttgcgtggcctcttggcgtcgtc

SEQ ID NO: 8308 - DNA, 25 bp, Homo sapiens
aaaaagcgcctggacaagctggagc

SEQ ID NO: 8309 - DNA, 25 bp, Homo sapiens
tgtgatgacggcctgagcccttgga

SEQ ID NO: 8310 - DNA, 25 bp, Homo sapiens
tcctggtggcctgtacagttctagc

SEQ ID NO: 8311 - DNA, 25 bp, Homo sapiens
ggctggtggcctgcttcttgttgat

SEQ ID NO: 8312 - DNA, 25 bp, Homo sapiens
agttccaagcccacacctgaagata

SEQ ID NO: 8313 - DNA, 25 bp, Homo sapiens
ggattagcgcctgctgctggataaa

SEQ ID NO: 8314 - DNA, 25 bp, Homo sapiens
gcaacaaagcccacatctttacggg

SEQ ID NO: 8315 - DNA, 25 bp, Homo sapiens
tgggtaagcccacacagctctttag

SEQ ID NO: 8316 - DNA, 25 bp, Homo sapiens
agaacagtcagccgtgtgagtctcc

SEQ ID NO: 8317 - DNA, 25 bp, Homo sapiens
gaacaccagccctatctgcataatg

SEQ ID NO: 8318 - DNA, 25 bp, Homo sapiens
tggacaccagcctccgaatgtgagc

SEQ ID NO: 8319 - DNA, 25 bp, Homo sapiens
aaacagaagccaccatttcagagca

SEQ ID NO: 8320 - DNA, 25 bp, Homo sapiens
cggtctcggccaaactggaatggaa

SEQ ID NO: 8321 - DNA, 25 bp, Homo sapiens
tgtgtgccggccaaggtggtcaggt

SEQ ID NO: 8322 - DNA, 25 bp, Homo sapiens
tgaggtgcggccacaggagaatgtg

SEQ ID NO: 8323 - DNA, 25 bp, Homo sapiens
cgttggtggccaggagcttcttgtc

SEQ ID NO: 8324 - DNA, 25 bp, Homo sapiens
ttaccggccacacacttggtgccag

SEQ ID NO: 8325 - DNA, 25 bp, Homo sapiens
ccaagggcgccaccatcaagcgcat

SEQ ID NO: 8326 - DNA, 25 bp, Homo sapiens
ttcctccagccagccaactcacagt

SEQ ID NO: 8327 - DNA, 25 bp, Homo sapiens
gctgctgttcgccaggtgctgctga

SEQ ID NO: 8328 - DNA, 25 bp, Homo sapiens
ggtcaccgccacagccggtgcgagg

SEQ ID NO: 8329 - DNA, 25 bp, Homo sapiens
gtgtttgcgccacacacctggaaag

SEQ ID NO: 8330 - DNA, 25 bp, Homo sapiens
gaggcagggccatgcttggcttccc

SEQ ID NO: 8331 - DNA, 25 bp, Homo sapiens
ggttgtagccaattttcttaatgta

SEQ ID NO: 8332 - DNA, 25 bp, Homo sapiens
gactggctggccatgatggtcacta

SEQ ID NO: 8333 - DNA, 25 bp, Homo sapiens
tctgcggtggccatggtgaacatct

SEQ ID NO: 8334 - DNA, 25 bp, Homo sapiens
tgaccaaagccacttgcaaagaaac

SEQ ID NO: 8335 - DNA, 25 bp, Homo sapiens
taactgaagccaagtcacaaacagg

SEQ ID NO: 8336 - DNA, 25 bp, Homo sapiens
catgcactcacacgccatctgtgga

SEQ ID NO: 8337 - DNA, 25 bp, Homo sapiens
gcttgtaagccacagacacctgcag

SEQ ID NO: 8338 - DNA, 25 bp, Homo sapiens
gatggccacagccactccatttgag

SEQ ID NO: 8339 - DNA, 25 bp, Homo sapiens
taccagccagccaataggatgcaca

SEQ ID NO: 8340 - DNA, 25 bp, Homo sapiens
agtttcctgcctcgtcgggcgcagc

SEQ ID NO: 8341 - DNA, 25 bp, Homo sapiens
ggtgaggcagccaaatccatggtgc

SEQ ID NO: 8342 - DNA, 25 bp, Homo sapiens
taactcacagccactcatcgggaac

SEQ ID NO: 8343 - DNA, 25 bp, Homo sapiens
tcctgctcctgcccctcctgcccct

SEQ ID NO: 8344 - DNA, 25 bp, Homo sapiens
ataataccagccatcacacacaaaa

SEQ ID NO: 8345 - DNA, 25 bp, Homo sapiens
gtgtgggtgccccatttcttgtcct

SEQ ID NO: 8346 - DNA, 25 bp, Homo sapiens
cagagtgtgcgtgccccatcttcac

SEQ ID NO: 8347 - DNA, 25 bp, Homo sapiens
tgctgaatgactgccctgtgtgaca

SEQ ID NO: 8348 - DNA, 25 bp, Homo sapiens
tgtggctggtgccttacaaagcaca

SEQ ID NO: 8349 - DNA, 25 bp, Homo sapiens
gaggctggtgcctcttgtcagctgc

SEQ ID NO: 8350 - DNA, 25 bp, Homo sapiens
tcctgggctgcctgagctttccagt

SEQ ID NO: 8351 - DNA, 25 bp, Homo sapiens
gagtggagtgcctgttataaagaaa

SEQ ID NO: 8352 - DNA, 25 bp, Homo sapiens
tactaagtgcctactgctgtgctgg

SEQ ID NO: 8353 - DNA, 25 bp, Homo sapiens
gaacaggtgcctccgtggatgtgca

SEQ ID NO: 8354 - DNA, 25 bp, Homo sapiens
tgtgtgtgccatgcccagattgaag

SEQ ID NO: 8355 - DNA, 25 bp, Homo sapiens
taacgtgtgcctgccgagttggtcg

SEQ ID NO: 8356 - DNA, 25 bp, Homo sapiens
tcgggtctgccttgcccgactgcag

SEQ ID NO: 8357 - DNA, 25 bp, Homo sapiens
tgtgtgtgcagatgccgccatttct

SEQ ID NO: 8358 - DNA, 25 bp, Homo sapiens
tgctgtcatcgatgccgtgctggac

SEQ ID NO: 8359 - DNA, 25 bp, Homo sapiens
ttatccttgccacacacaactgcgg

SEQ ID NO: 8360 - DNA, 25 bp, Homo sapiens
gtgcttgcttgccattcagccaagg

SEQ ID NO: 8361 - DNA, 25 bp, Homo sapiens
taaaagtgccacacagacctaatgt

SEQ ID NO: 8362 - DNA, 25 bp, Homo sapiens
acagatgtgtgtgccattggcccgc

SEQ ID NO: 8363 - DNA, 25 bp, Homo sapiens
tgcatagtatgtgccaccaccagta

SEQ ID NO: 8364 - DNA, 25 bp, Homo sapiens
ggtgtgagtgccaacctgcagagcc

SEQ ID NO: 8365 - DNA, 25 bp, Homo sapiens
aaggtgcctgccactgtcgctgtac

SEQ ID NO: 8366 - DNA, 25 bp, Homo sapiens
agtgtgtgtgctgccagagcaagca

SEQ ID NO: 8367 - DNA, 25 bp, Homo sapiens
gatgggctccgggcgcggagaaact

SEQ ID NO: 8368 - DNA, 25 bp, Homo sapiens
tcggagaccgggtccagagccctca

SEQ ID NO: 8369 - DNA, 25 bp, Homo sapiens
cctgtgataccggtgatgagcgcca

SEQ ID NO: 8370 - DNA, 25 bp, Homo sapiens
ggtgacccggatgaaggattaacag

SEQ ID NO: 8371 - DNA, 25 bp, Homo sapiens
acagggtccggtggctgctgactcc

SEQ ID NO: 8372 - DNA, 25 bp, Homo sapiens
ggcaggcccggctcagtgttccgtt

SEQ ID NO: 8373 - DNA, 25 bp, Homo sapiens
tccgttccggcatggcggctggcat

SEQ ID NO: 8374 - DNA, 25 bp, Homo sapiens
tttgcaggccggaggacagtagctc

SEQ ID NO: 8375 - DNA, 25 bp, Homo sapiens
cgatcagataccgtcgttgttccga

SEQ ID NO: 8376 - DNA, 25 bp, Homo sapiens
gagcacacccgtctatgtagcaaaa

SEQ ID NO: 8377 - DNA, 25 bp, Homo sapiens
tcagcctgcccgtggtggaagtaag

SEQ ID NO: 8378 - DNA, 25 bp, Homo sapiens
tcaggaagccgtgcggcaggtcctc

SEQ ID NO: 8379 - DNA, 25 bp, Homo sapiens
agggctggacggctagggtgctgac

SEQ ID NO: 8380 - DNA, 25 bp, Homo sapiens
gacttgtccgtgtgtctgtccgcgc

SEQ ID NO: 8381 - DNA, 25 bp, Homo sapiens
tgtcagtggccgtgtggcgacttcc

SEQ ID NO: 8382 - DNA, 25 bp, Homo sapiens
gaggtggccgtgttgctgatccaca

SEQ ID NO: 8383 - DNA, 25 bp, Homo sapiens
tctgtggtccgtgtgtggcagcatc

SEQ ID NO: 8384 - DNA, 25 bp, Homo sapiens
tttgtcaacggcctttcctgcctct

SEQ ID NO: 8385 - DNA, 25 bp, Homo sapiens
ggtgtgtccgtgcatgatgcatgta

SEQ ID NO: 8386 - DNA, 25 bp, Homo sapiens
taaacaacggtgtggctgcttctca

SEQ ID NO: 8387 - DNA, 25 bp, Homo sapiens
tcgccagtacggcgggtcgcggcgg

SEQ ID NO: 8388 - DNA, 25 bp, Homo sapiens
ccaggatggacggaacatggactgt

SEQ ID NO: 8389 - DNA, 25 bp, Homo sapiens
gaaactacgggtctaagcacacacg

SEQ ID NO: 8390 - DNA, 25 bp, Homo sapiens
ttgtccgacggctgctgcaactgcg

SEQ ID NO: 8391 - DNA, 25 bp, Homo sapiens
ggtgagcgacggtccaatgccttca

SEQ ID NO: 8392 - DNA, 25 bp, Homo sapiens
tcactgtgatgacggccgtggctgt

SEQ ID NO: 8393 - DNA, 25 bp, Homo sapiens
gaacacacacggaattatgaggtgg

SEQ ID NO: 8394 - DNA, 25 bp, Homo sapiens
gaaggcgacgtggtgtccaaccatc

SEQ ID NO: 8395 - DNA, 25 bp, Homo sapiens
aggacaggacgttaccaagcccagt

SEQ ID NO: 8396 - DNA, 25 bp, Homo sapiens
tgaggtcgacgtggtctccagtgac

SEQ ID NO: 8397 - DNA, 25 bp, Homo sapiens
tgcacagagctgacgtggacctttt

SEQ ID NO: 8398 - DNA, 25 bp, Homo sapiens
tgtcatccaacgtgcgtggctggca

SEQ ID NO: 8399 - DNA, 25 bp, Homo sapiens
gcaggtgtcacgtgggtgtggcctc

SEQ ID NO: 8400 - DNA, 25 bp, Homo sapiens
ggtcgccacgtctgatctgaggtcg

SEQ ID NO: 8401 - DNA, 25 bp, Homo sapiens
tgcacactcagacgtgaacacacag

SEQ ID NO: 8402 - DNA, 25 bp, Homo sapiens
tgccaccaccgatgagaaaaaaagg

SEQ ID NO: 8403 - DNA, 25 bp, Homo sapiens
ctgggcacacacgtgggcataggca

SEQ ID NO: 8404 - DNA, 25 bp, Homo sapiens
gatgagcgccacgttcctgggcttg

SEQ ID NO: 8405 - DNA, 25 bp, Homo sapiens
agatgccacacacgtatcacacata

SEQ ID NO: 8406 - DNA, 25 bp, Homo sapiens
tgccagccacacgtgctcaggaagg

SEQ ID NO: 8407 - DNA, 25 bp, Homo sapiens
aggatccacacgtcacccagagtga

SEQ ID NO: 8408 - DNA, 25 bp, Homo sapiens
aggtgtgtgcacgtctcagaactca

SEQ ID NO: 8409 - DNA, 25 bp, Homo sapiens
acatcgcatgcacacgtcaccgtga

SEQ ID NO: 8410 - DNA, 25 bp, Homo sapiens
caagcacacacacgtgttgtcatgg

SEQ ID NO: 8411 - DNA, 25 bp, Homo sapiens
tcagtgattccgaagcctggctccg

SEQ ID NO: 8412 - DNA, 25 bp, Homo sapiens
gaaaaccgaaccaccatacttatga

SEQ ID NO: 8413 - DNA, 25 bp, Homo sapiens
tgtgtgcattccgaacagggctgcc

SEQ ID NO: 8414 - DNA, 25 bp, Homo sapiens
catatgccaaccgacacaaatggaa

SEQ ID NO: 8415 - DNA, 25 bp, Homo sapiens
ttagctgcgccgaacccagccaatg

SEQ ID NO: 8416 - DNA, 25 bp, Homo sapiens
caggcacacccgattcctggagcgt

SEQ ID NO: 8417 - DNA, 25 bp, Homo sapiens
ccgtgcgtgccgagtgctgtgcaaa

SEQ ID NO: 8418 - DNA, 25 bp, Homo sapiens
tggcagtgtgccgagactgagccat

SEQ ID NO: 8419 - DNA, 25 bp, Homo sapiens
actcccacacgagccaagtgcagta

SEQ ID NO: 8420 - DNA, 25 bp, Homo sapiens
accacagacacgagggaggtccctc

SEQ ID NO: 8421 - DNA, 25 bp, Homo sapiens
ctcatccacacacgagtggtccaat

SEQ ID NO: 8422 - DNA, 25 bp, Homo sapiens
tgacatcacgcacgacatcgaggcg

SEQ ID NO: 8423 - DNA, 25 bp, Homo sapiens
cagtgaacagacgagtggacgcagt

SEQ ID NO: 8424 - DNA, 25 bp, Homo sapiens
gggtagcacgaacaccaccgcagac

SEQ ID NO: 8425 - DNA, 25 bp, Homo sapiens
tgatcacacacacgagcagggttct

SEQ ID NO: 8426 - DNA, 25 bp, Homo sapiens
ggaagtgcacgacgcaccacctctt

SEQ ID NO: 8427 - DNA, 25 bp, Homo sapiens
agcaccacgcacgatggctgtttct

SEQ ID NO: 8428 - DNA, 25 bp, Homo sapiens
gctcaccagcacgatggaacacatt

SEQ ID NO: 8429 - DNA, 25 bp, Homo sapiens
tgcacgagcacacgagttcagaggc

SEQ ID NO: 8430 - DNA, 25 bp, Homo sapiens
gcagagcggtcggcgtaccatccgc

SEQ ID NO: 8431 - DNA, 25 bp, Homo sapiens
cagcaccacgcacgatggctgtttc

SEQ ID NO: 8432 - DNA, 25 bp, Homo sapiens
gccttctgcacgatgtgctgtgctt

SEQ ID NO: 8433 - DNA, 25 bp, Homo sapiens
gactgcagcacacgatgacatcaaa

SEQ ID NO: 8434 - DNA, 25 bp, Homo sapiens
ccggcggtcggcctcaatgaagatg

SEQ ID NO: 8435 - DNA, 25 bp, Homo sapiens
gaaggttgcggcttcttccagttct

SEQ ID NO: 8436 - DNA, 25 bp, Homo sapiens
ttccgtgctcgggtgcttcggccag

SEQ ID NO: 8437 - DNA, 25 bp, Homo sapiens
tgtccactgtcgtccacttccttag

SEQ ID NO: 8438 - DNA, 25 bp, Homo sapiens
cgcgcctggctcggcgggccggccc

SEQ ID NO: 8439 - DNA, 25 bp, Homo sapiens
gagttttcgtcttctgatccggctt

SEQ ID NO: 8440 - DNA, 25 bp, Homo sapiens
ctgtggtggctcgttggtctttgtc

SEQ ID NO: 8441 - DNA, 25 bp, Homo sapiens
aaatcctctcgttgtgcatagccac

SEQ ID NO: 8442 - DNA, 25 bp, Homo sapiens
ggctggtgctcgtatctacaaaaat

SEQ ID NO: 8443 - DNA, 25 bp, Homo sapiens
cgtgtttcatcgtggctgctgtctg

SEQ ID NO: 8444 - DNA, 25 bp, Homo sapiens
cccgcgatcatcgtggctgtggctc

SEQ ID NO: 8445 - DNA, 25 bp, Homo sapiens
tcacacgcccgcacccacgcaggtc

SEQ ID NO: 8446 - DNA, 25 bp, Homo sapiens
ggggcccgcctacgctacgccgctc

SEQ ID NO: 8447 - DNA, 25 bp, Homo sapiens
tgtcgtcgccgcctcttgggttgga

SEQ ID NO: 8448 - DNA, 25 bp, Homo sapiens
gaacggccgctttggtgctggactc

SEQ ID NO: 8449 - DNA, 25 bp, Homo sapiens
tcccattacgctggctggatataag

SEQ ID NO: 8450 - DNA, 25 bp, Homo sapiens
tcctgatgcccgctggaggtcagag

SEQ ID NO: 8451 - DNA, 25 bp, Homo sapiens
gaatgccatacgcgcggcggggccg

SEQ ID NO: 8452 - DNA, 25 bp, Homo sapiens
tgaaaacacgccaagcacacactgg

SEQ ID NO: 8453 - DNA, 25 bp, Homo sapiens
gagcacgtacgcacggaccgacgtc

SEQ ID NO: 8454 - DNA, 25 bp, Homo sapiens
aaaccccgcagcgtagtttctggct

SEQ ID NO: 8455 - DNA, 25 bp, Homo sapiens
gaacactcacgctgtactcggatgg

SEQ ID NO: 8456 - DNA, 25 bp, Homo sapiens
cggcaacacacgctaccataaaggg

SEQ ID NO: 8457 - DNA, 25 bp, Homo sapiens
gaacaacacgcaactgcaatgcacc

SEQ ID NO: 8458 - DNA, 25 bp, Homo sapiens
tgcccaggacgcacacaaacatgaa

SEQ ID NO: 8459 - DNA, 25 bp, Homo sapiens
acagacccacgcacgctggaggctt

SEQ ID NO: 8460 - DNA, 25 bp, Homo sapiens
tgacaccgcacgctgagctctgtga

SEQ ID NO: 8461 - DNA, 25 bp, Homo sapiens
gtgtcgcacacgcacggaatagtat

SEQ ID NO: 8462 - DNA, 25 bp, Homo sapiens
gacaaacacgcagtcagggagtgga

SEQ ID NO: 8463 - DNA, 25 bp, Homo sapiens
ccgcaacgccgcacagatttatcat

SEQ ID NO: 8464 - DNA, 25 bp, Homo sapiens
ccgaggtgccgcacagctgtctgca

SEQ ID NO: 8465 - DNA, 25 bp, Homo sapiens
ccggctattcgctccagggtatcta

SEQ ID NO: 8466 - DNA, 25 bp, Homo sapiens
gaggaccacgcacgtatctcttgag

SEQ ID NO: 8467 - DNA, 25 bp, Homo sapiens
tcacgggcacgcacacggaggactg

SEQ ID NO: 8468 - DNA, 25 bp, Homo sapiens
gaagcccacgcacgacatgatgaag

SEQ ID NO: 8469 - DNA, 25 bp, Homo sapiens
tctgaacacacgcacagctttggct

SEQ ID NO: 8470 - DNA, 25 bp, Homo sapiens
tgagaaacacgcacacaaagctgcg

SEQ ID NO: 8471 - DNA, 25 bp, Homo sapiens
gcacggtgtcgcacacgccctggag

SEQ ID NO: 8472 - DNA, 25 bp, Homo sapiens
gcgcatctgctcacgcacgctgctg

SEQ ID NO: 8473 - DNA, 25 bp, Homo sapiens
cacacggacacgcatgaaatttggt

SEQ ID NO: 8474 - DNA, 25 bp, Homo sapiens
agcacggtgtcgcacacgccctgga

SEQ ID NO: 8475 - DNA, 25 bp, Homo sapiens
acggcgtgtcgcgtcggtccgctct

SEQ ID NO: 8476 - DNA, 25 bp, Homo sapiens
tttgagtatcgcatcacacacctcc

SEQ ID NO: 8477 - DNA, 25 bp, Homo sapiens
tgactgggtcgctgtggtcaacact

SEQ ID NO: 8478 - DNA, 25 bp, Homo sapiens
gcggcgcggcgtgggtcgggagcgg

SEQ ID NO: 8479 - DNA, 25 bp, Homo sapiens
tgtattcggcgtgtggcttccaagt

SEQ ID NO: 8480 - DNA, 25 bp, Homo sapiens
aacctggcgcggcttttggcacaaa

SEQ ID NO: 8481 - DNA, 25 bp, Homo sapiens
cgtgggcggcggtacgcatggacga

SEQ ID NO: 8482 - DNA, 25 bp, Homo sapiens
actcaggcaggcggagttggccttc

SEQ ID NO: 8483 - DNA, 25 bp, Homo sapiens
ctgggcgcggcgggccggcaggcca

SEQ ID NO: 8484 - DNA, 25 bp, Homo sapiens
ccggcgcggcggcaaagactctatt

SEQ ID NO: 8485 - DNA, 25 bp, Homo sapiens
tcagtggtggcggttctagtcatca

SEQ ID NO: 8486 - DNA, 25 bp, Homo sapiens
gggtgaggcggctgctctcatattt

SEQ ID NO: 8487 - DNA, 25 bp, Homo sapiens
cccggcggcggttatcaaatcacag

SEQ ID NO: 8488 - DNA, 25 bp, Homo sapiens
gggcgggcggcgtaccgcgcggagg

SEQ ID NO: 8489 - DNA, 25 bp, Homo sapiens
gggcggcgcgggccggtagcgcacc

SEQ ID NO: 8490 - DNA, 25 bp, Homo sapiens
tacgcgcggcggatggtttccactt

SEQ ID NO: 8491 - DNA, 25 bp, Homo sapiens
ttcctgtggcggtgtggctacctca

SEQ ID NO: 8492 - DNA, 25 bp, Homo sapiens
gtgcggcggcgtccgttacgctcca

SEQ ID NO: 8493 - DNA, 25 bp, Homo sapiens
cgcggtcgcgcgggcgacgccggcg

SEQ ID NO: 8494 - DNA, 25 bp, Homo sapiens
tagaagcggcggcaggtctgctcgc

SEQ ID NO: 8495 - DNA, 25 bp, Homo sapiens
acgaatccgcggtggctgtctgcgc

SEQ ID NO: 8496 - DNA, 25 bp, Homo sapiens
tcatgctaccgcggcacgcacatgg

SEQ ID NO: 8497 - DNA, 25 bp, Homo sapiens
tggtgcctggcgttctgtgaacatc

SEQ ID NO: 8498 - DNA, 25 bp, Homo sapiens
ttcacacacgcgtatggagacttga

SEQ ID NO: 8499 - DNA, 25 bp, Homo sapiens
gaggagtcagcgtggtgtagaaaac

SEQ ID NO: 8500 - DNA, 25 bp, Homo sapiens
aaggcgcggcgtcaggtggcggctg

SEQ ID NO: 8501 - DNA, 25 bp, Homo sapiens
gcagggagagcggataaagcacaaa

SEQ ID NO: 8502 - DNA, 25 bp, Homo sapiens
gcgcgccggcgtgcggccggcccgc

SEQ ID NO: 8503 - DNA, 25 bp, Homo sapiens
ttcagggcagcggaattccggctcc

SEQ ID NO: 8504 - DNA, 25 bp, Homo sapiens
gcacaggtgagcgtgtggatcccat

SEQ ID NO: 8505 - DNA, 25 bp, Homo sapiens
cacctggcggcgatagtagatggat

SEQ ID NO: 8506 - DNA, 25 bp, Homo sapiens
gcggcctagcgttgctgcctgcttt

SEQ ID NO: 8507 - DNA, 25 bp, Homo sapiens
ggctctgaagcgtgtgtggccacat

SEQ ID NO: 8508 - DNA, 25 bp, Homo sapiens
gagagccaggcgaagtccttgtcag

SEQ ID NO: 8509 - DNA, 25 bp, Homo sapiens
tccaggcggcgagagtggttctcca

SEQ ID NO: 8510 - DNA, 25 bp, Homo sapiens
tggtgacggcgatgaacggtacatt

SEQ ID NO: 8511 - DNA, 25 bp, Homo sapiens
gctcacatcgtgcggccgtgcccta

SEQ ID NO: 8512 - DNA, 25 bp, Homo sapiens
aacggtggcgctgatgttaaagatc

SEQ ID NO: 8513 - DNA, 25 bp, Homo sapiens
cgtaggtgtgcgtgacattgtgctc

SEQ ID NO: 8514 - DNA, 25 bp, Homo sapiens
tttctctgtgcggtacggctgatcg

SEQ ID NO: 8515 - DNA, 25 bp, Homo sapiens
gtggcggctgcgtggtcaagatgct

SEQ ID NO: 8516 - DNA, 25 bp, Homo sapiens
atatgggtgtgcgagtgtatgtata

SEQ ID NO: 8517 - DNA, 25 bp, Homo sapiens
gaagttgtgcgtggtgtgatttcca

SEQ ID NO: 8518 - DNA, 25 bp, Homo sapiens
agacagtggcagcgaaagcggctcc

SEQ ID NO: 8519 - DNA, 25 bp, Homo sapiens
tgtgtgtgtgcagcgagtacctcct

SEQ ID NO: 8520 - DNA, 25 bp, Homo sapiens
ccatcagagatgtgcgtgcccaatt

SEQ ID NO: 8521 - DNA, 25 bp, Homo sapiens
gtcccgtgcgtgtgtgtcaggctct

SEQ ID NO: 8522 - DNA, 25 bp, Homo sapiens
aaacagtggcgcgtgtcagaagtcc

SEQ ID NO: 8523 - DNA, 25 bp, Homo sapiens
tggctggagtgcgttttcaccagga

SEQ ID NO: 8524 - DNA, 25 bp, Homo sapiens
cattagctgtgctgcggcttggctg

SEQ ID NO: 8525 - DNA, 25 bp, Homo sapiens
ctgcggctgctgtgcgtgccactga

SEQ ID NO: 8526 - DNA, 25 bp, Homo sapiens
cacccgcgtgcgtgtccttgaggcg

SEQ ID NO: 8527 - DNA, 25 bp, Homo sapiens
acacggcggcgctgaaatacctcat

SEQ ID NO: 8528 - DNA, 25 bp, Homo sapiens
atggggcagcgcgcggtgagctgag

SEQ ID NO: 8529 - DNA, 25 bp, Homo sapiens
cggcggcggcgcctttccaatatgg

SEQ ID NO: 8530 - DNA, 25 bp, Homo sapiens
ataagtggtgcgcaggagcgtcctc

SEQ ID NO: 8531 - DNA, 25 bp, Homo sapiens
agattttcgttcattttggttctca

SEQ ID NO: 8532 - DNA, 25 bp, Homo sapiens
caggctgacagtgcgcacgttgtag

SEQ ID NO: 8533 - DNA, 25 bp, Homo sapiens
ctagctgtgtgtgcgcttgctgtgt

SEQ ID NO: 8534 - DNA, 25 bp, Homo sapiens
gtcctttttaggttgggtctctgca

SEQ ID NO: 8535 - DNA, 25 bp, Homo sapiens
tgtggagcttttaggacgttctgaa

SEQ ID NO: 8536 - DNA, 25 bp, Homo sapiens
gagaggttttctgtccggctgcaaa

SEQ ID NO: 8537 - DNA, 25 bp, Homo sapiens
aaggctgcagtttactctggcaatg

SEQ ID NO: 8538 - DNA, 25 bp, Homo sapiens
cattcacggttttggttggagcgat

SEQ ID NO: 8539 - DNA, 25 bp, Homo sapiens
tcgcgttgttttgtgtgagctcgtg

SEQ ID NO: 8540 - DNA, 25 bp, Homo sapiens
cagttcagtgttttgatctgacgca

SEQ ID NO: 8541 - DNA, 25 bp, Homo sapiens
tggcggcgtttccccggcggcgcta

SEQ ID NO: 8542 - DNA, 25 bp, Homo sapiens
tgcagtgggtttcttgttttcattg

SEQ ID NO: 8543 - DNA, 25 bp, Homo sapiens
aatgccgatgtttcaggtttctgag

SEQ ID NO: 8544 - DNA, 25 bp, Homo sapiens
caagtcccttttggctggtggcagg

SEQ ID NO: 8545 - DNA, 25 bp, Homo sapiens
caacttgacttttcttgctctgagg

SEQ ID NO: 8546 - DNA, 25 bp, Homo sapiens
gacacacactttacagtaccgaaga

SEQ ID NO: 8547 - DNA, 25 bp, Homo sapiens
ggctattcttttccacacaccaatg

SEQ ID NO: 8548 - DNA, 25 bp, Homo sapiens
tggaggcactttctgtcccaggaag

SEQ ID NO: 8549 - DNA, 25 bp, Homo sapiens
ctttccctttcatatgctatgtgaa

SEQ ID NO: 8550 - DNA, 25 bp, Homo sapiens
cagcggcaggcttttgtaggttttg

SEQ ID NO: 8551 - DNA, 25 bp, Homo sapiens
ggtcggctttctttccatgcaatgt

SEQ ID NO: 8552 - DNA, 25 bp, Homo sapiens
gccatagctgctttccggagactca

SEQ ID NO: 8553 - DNA, 25 bp, Homo sapiens
tttttctttggcagatcgttccaca

SEQ ID NO: 8554 - DNA, 25 bp, Homo sapiens
tgcggcggctttgagtgcgaggcca

SEQ ID NO: 8555 - DNA, 25 bp, Homo sapiens
tggtgtgagctttgccctccagcag

SEQ ID NO: 8556 - DNA, 25 bp, Homo sapiens
cacacacagaatttttgtagtcgta

SEQ ID NO: 8557 - DNA, 25 bp, Homo sapiens
cagcacagggatttggccaagtcaa

SEQ ID NO: 8558 - DNA, 25 bp, Homo sapiens
acacacacatatttgtaagcagctg

SEQ ID NO: 8559 - DNA, 25 bp, Homo sapiens
tgtagggttagtaggactgctcttg

SEQ ID NO: 8560 - DNA, 25 bp, Homo sapiens
gtgtgtgtgttagagctgttagcat

SEQ ID NO: 8561 - DNA, 25 bp, Homo sapiens
ggaatccttaacacagcacaagttg

SEQ ID NO: 8562 - DNA, 25 bp, Homo sapiens
tttcttcttacaggcagaggcctgg

SEQ ID NO: 8563 - DNA, 25 bp, Homo sapiens
tctgctgttgcttacccttggctcc

SEQ ID NO: 8564 - DNA, 25 bp, Homo sapiens
ccttcttgcttaggtactggctgca

SEQ ID NO: 8565 - DNA, 25 bp, Homo sapiens
ggaagtcttatcaacaacaccccgc

SEQ ID NO: 8566 - DNA, 25 bp, Homo sapiens
gctgtggctgattaatatccaccca

SEQ ID NO: 8567 - DNA, 25 bp, Homo sapiens
gaatggcagattacacacactctag

SEQ ID NO: 8568 - DNA, 25 bp, Homo sapiens
gactcaggtaagttgcaaggattaa

SEQ ID NO: 8569 - DNA, 25 bp, Homo sapiens
accaccacattagcttagatatggt

SEQ ID NO: 8570 - DNA, 25 bp, Homo sapiens
cggttgtttccctgcggtggctgtg

SEQ ID NO: 8571 - DNA, 25 bp, Homo sapiens
ggtctgtttcccacacactggcatt

SEQ ID NO: 8572 - DNA, 25 bp, Homo sapiens
tggcggtttccatgttcaggtttct

SEQ ID NO: 8573 - DNA, 25 bp, Homo sapiens
atggcggcgttccaaaaggcacccg

SEQ ID NO: 8574 - DNA, 25 bp, Homo sapiens
tgtagggttccttggcagtctgcgc

SEQ ID NO: 8575 - DNA, 25 bp, Homo sapiens
gcatctgaagttccaacacaacacc

SEQ ID NO: 8576 - DNA, 25 bp, Homo sapiens
tcagaacagttcctcacacacaaag

SEQ ID NO: 8577 - DNA, 25 bp, Homo sapiens
ccacaggtttcgcatgtaaatggca

SEQ ID NO: 8578 - DNA, 25 bp, Homo sapiens
ggccactgttcgcacacacctggtg

SEQ ID NO: 8579 - DNA, 25 bp, Homo sapiens
tatgcttgcatttcgctttcttgag

SEQ ID NO: 8580 - DNA, 25 bp, Homo sapiens
tcggtggcttccagggcttgccttc

SEQ ID NO: 8581 - DNA, 25 bp, Homo sapiens
tcttcctcttccactgatgtttctt

SEQ ID NO: 8582 - DNA, 25 bp, Homo sapiens
agcctgggttctggtttcacttgag

SEQ ID NO: 8583 - DNA, 25 bp, Homo sapiens
cagcctggagcttcctctttattca

SEQ ID NO: 8584 - DNA, 25 bp, Homo sapiens
tagtgtgtgttctgccaaagcaagt

SEQ ID NO: 8585 - DNA, 25 bp, Homo sapiens
caacaagcgttctggctgctgctcg

SEQ ID NO: 8586 - DNA, 25 bp, Homo sapiens
cacagacacacattccatacacaga

SEQ ID NO: 8587 - DNA, 25 bp, Homo sapiens
gagccattcattccagcaggtagag

SEQ ID NO: 8588 - DNA, 25 bp, Homo sapiens
gcagcgattattctttgcacgcaca

SEQ ID NO: 8589 - DNA, 25 bp, Homo sapiens
cagttttttcacgaatgcccaattc

SEQ ID NO: 8590 - DNA, 25 bp, Homo sapiens
tgtcttgctttcaactagacatcag

SEQ ID NO: 8591 - DNA, 25 bp, Homo sapiens
tataaggattctggtcatccccaaa

SEQ ID NO: 8592 - DNA, 25 bp, Homo sapiens
tgaacacagttcaccaccaccataa

SEQ ID NO: 8593 - DNA, 25 bp, Homo sapiens
ctgaaggcgttcacaccacagcacg

SEQ ID NO: 8594 - DNA, 25 bp, Homo sapiens
cattcacagtgttcacacacctcag

SEQ ID NO: 8595 - DNA, 25 bp, Homo sapiens
ggcacagccttcacactttcgatgg

SEQ ID NO: 8596 - DNA, 25 bp, Homo sapiens
catacttagcttcaagggatgctgg

SEQ ID NO: 8597 - DNA, 25 bp, Homo sapiens
tctttctttcatctgctcttcgtgc

SEQ ID NO: 8598 - DNA, 25 bp, Homo sapiens
cttgtggctgcttcatcgtcatgga

SEQ ID NO: 8599 - DNA, 25 bp, Homo sapiens
catcacaccacttcattgctcttgg

SEQ ID NO: 8600 - DNA, 25 bp, Homo sapiens
tggagtcaggttttcacacacagca

SEQ ID NO: 8601 - DNA, 25 bp, Homo sapiens
caggctgcgcggtttcccgaaacca

SEQ ID NO: 8602 - DNA, 25 bp, Homo sapiens
gtttaggtttcgcacacactcggcc

SEQ ID NO: 8603 - DNA, 25 bp, Homo sapiens
cagagaggctggtttgcggacaatt

SEQ ID NO: 8604 - DNA, 25 bp, Homo sapiens
tggagctgggttcttgaaacactgc

SEQ ID NO: 8605 - DNA, 25 bp, Homo sapiens
gaattatggttggacttcgtgcttg

SEQ ID NO: 8606 - DNA, 25 bp, Homo sapiens
tgcaggcagaggttgtataacaggg

SEQ ID NO: 8607 - DNA, 25 bp, Homo sapiens
tcactagccgttcaaaaagggacac

SEQ ID NO: 8608 - DNA, 25 bp, Homo sapiens
gagctcccgtttggacgccagggaa

SEQ ID NO: 8609 - DNA, 25 bp, Homo sapiens
gcaggcagtgcgttgcgtctataaa

SEQ ID NO: 8610 - DNA, 25 bp, Homo sapiens
gcggcagtgcgtttgttgatttcat

SEQ ID NO: 8611 - DNA, 25 bp, Homo sapiens
gcgctggaagttgtctgtgcccaca

SEQ ID NO: 8612 - DNA, 25 bp, Homo sapiens
tgcgtgcgtgagttccccagagtat

SEQ ID NO: 8613 - DNA, 25 bp, Homo sapiens
gaggcggagttgtgctcagtcaccc

SEQ ID NO: 8614 - DNA, 25 bp, Homo sapiens
actttgcacagtttggcccagcggg

SEQ ID NO: 8615 - DNA, 25 bp, Homo sapiens
ggccccagttatacacacacacagt

SEQ ID NO: 8616 - DNA, 25 bp, Homo sapiens
agtgaacacagttcaccaccaccat

SEQ ID NO: 8617 - DNA, 25 bp, Homo sapiens
gcagtagggtaccacacacagcatg

SEQ ID NO: 8618 - DNA, 25 bp, Homo sapiens
caagcggcggtacttgatttcgtac

SEQ ID NO: 8619 - DNA, 25 bp, Homo sapiens
caggctgcgtggtaactgcaaacat

SEQ ID NO: 8620 - DNA, 25 bp, Homo sapiens
tctggcaaggtagggttcgttctga

SEQ ID NO: 8621 - DNA, 25 bp, Homo sapiens
tgtggctgggtagctctgattctcc

SEQ ID NO: 8622 - DNA, 25 bp, Homo sapiens
cgtgcggcggtagctgttcttctcc

SEQ ID NO: 8623 - DNA, 25 bp, Homo sapiens
gctcggctgcgtagtcctcgtagta

SEQ ID NO: 8624 - DNA, 25 bp, Homo sapiens
tgtcagtgaggtgtgtggtatgtat

SEQ ID NO: 8625 - DNA, 25 bp, Homo sapiens
attgaaacgtacacacacccagggt

SEQ ID NO: 8626 - DNA, 25 bp, Homo sapiens
aggcaggaggtatgtgaagaaaaac

SEQ ID NO: 8627 - DNA, 25 bp, Homo sapiens
gagttgagcgtagagtaccggacca

SEQ ID NO: 8628 - DNA, 25 bp, Homo sapiens
ggtactcgtattgcgcctcgatggc

SEQ ID NO: 8629 - DNA, 25 bp, Homo sapiens
ccaggagcaggtatgtttcaaagcc

SEQ ID NO: 8630 - DNA, 25 bp, Homo sapiens
tctgtaacttgaaacggagcgtcct

SEQ ID NO: 8631 - DNA, 25 bp, Homo sapiens
gccacacacgtatcacacatatgtc

SEQ ID NO: 8632 - DNA, 25 bp, Homo sapiens
tcacacacgcgtatggagacttgat

SEQ ID NO: 8633 - DNA, 25 bp, Homo sapiens
gccggtagtagtcgtgggtggccac

SEQ ID NO: 8634 - DNA, 25 bp, Homo sapiens
cctcacacatagtaaggcacacact

SEQ ID NO: 8635 - DNA, 25 bp, Homo sapiens
taggcaggagtagagggataccttt

SEQ ID NO: 8636 - DNA, 25 bp, Homo sapiens
acccagttgttcacacacactcatt

SEQ ID NO: 8637 - DNA, 25 bp, Homo sapiens
gaatcctgtgtttatgtctgcaacc

SEQ ID NO: 8638 - DNA, 25 bp, Homo sapiens
cagcgggtgtgttgtgcagtttcca

SEQ ID NO: 8639 - DNA, 25 bp, Homo sapiens
tgtttcctgttctccctgcttggag

SEQ ID NO: 8640 - DNA, 25 bp, Homo sapiens
actgatggctgctgttaggagtgcg

SEQ ID NO: 8641 - DNA, 25 bp, Homo sapiens
acgatgcggctgttggtacgacaca

SEQ ID NO: 8642 - DNA, 25 bp, Homo sapiens
ataagccagatgtttcaccccactc

SEQ ID NO: 8643 - DNA, 25 bp, Homo sapiens
ttcacgtgctgttggatgctgtccc

SEQ ID NO: 8644 - DNA, 25 bp, Homo sapiens
gacacattctgtacacacagacaca

SEQ ID NO: 8645 - DNA, 25 bp, Homo sapiens
aaatttgtgtatcatccttgtacgg

SEQ ID NO: 8646 - DNA, 25 bp, Homo sapiens
atgtagtgcatgtgtatgttgtgtg

SEQ ID NO: 8647 - DNA, 25 bp, Homo sapiens
ccgaggctgctgtatcaggacgaca

SEQ ID NO: 8648 - DNA, 25 bp, Homo sapiens
tgtgagtgtgtgtgggcatgcctgt

SEQ ID NO: 8649 - DNA, 25 bp, Homo sapiens
gcttgagggtccacacacacaattg

SEQ ID NO: 8650 - DNA, 25 bp, Homo sapiens
ggcaggaggtccgattcgcaggtgc

SEQ ID NO: 8651 - DNA, 25 bp, Homo sapiens
atggagctgaggtcccctgacagcc

SEQ ID NO: 8652 - DNA, 25 bp, Homo sapiens
tggctgtgctggtccgaacctccag

SEQ ID NO: 8653 - DNA, 25 bp, Homo sapiens
gcagtgtgcaggtccgagatgaggc

SEQ ID NO: 8654 - DNA, 25 bp, Homo sapiens
caggtgctgggtccaggagtctcct

SEQ ID NO: 8655 - DNA, 25 bp, Homo sapiens
agcgagcgcggtcgggaacctccac

SEQ ID NO: 8656 - DNA, 25 bp, Homo sapiens
ttccttggtcgcacacaccttgaca

SEQ ID NO: 8657 - DNA, 25 bp, Homo sapiens
gccgcgtggtcgtgtgtctgtccct

SEQ ID NO: 8658 - DNA, 25 bp, Homo sapiens
tggtgtgatcgtccgcatccgtatg

SEQ ID NO: 8659 - DNA, 25 bp, Homo sapiens
ttagcgtgcgtccagtccctggcac

SEQ ID NO: 8660 - DNA, 25 bp, Homo sapiens
catgggcggcgtcctctttggcgat

SEQ ID NO: 8661 - DNA, 25 bp, Homo sapiens
tctgaggcggtctagagcaatctac

SEQ ID NO: 8662 - DNA, 25 bp, Homo sapiens
cacacacacggtctttaaactgata

SEQ ID NO: 8663 - DNA, 25 bp, Homo sapiens
aatggagaggtctcgctggccttct

SEQ ID NO: 8664 - DNA, 25 bp, Homo sapiens
cctgtgtcggtctgtgtgtcagctt

SEQ ID NO: 8665 - DNA, 25 bp, Homo sapiens
ggtctccgtctaccaccactttgaa

SEQ ID NO: 8666 - DNA, 25 bp, Homo sapiens
gaaaacagtccagcacgcactgaac

SEQ ID NO: 8667 - DNA, 25 bp, Homo sapiens
atcgcacacacagtcccaagacgtg

SEQ ID NO: 8668 - DNA, 25 bp, Homo sapiens
gagtgcatgtgagtctctgagcaag

SEQ ID NO: 8669 - DNA, 25 bp, Homo sapiens
tgtgtgtgcatgagtctcagtcagt

SEQ ID NO: 8670 - DNA, 25 bp, Homo sapiens
acatgtgtgtggtcaaggcttgcac

SEQ ID NO: 8671 - DNA, 25 bp, Homo sapiens
ggcaggtggtcagccaacaagctgc

SEQ ID NO: 8672 - DNA, 25 bp, Homo sapiens
ttcacacacgtcacagaaagtcctt

SEQ ID NO: 8673 - DNA, 25 bp, Homo sapiens
ggcccacgtcacagtcacactggtg

SEQ ID NO: 8674 - DNA, 25 bp, Homo sapiens
catcgttggtgtccggcaggtctaa

SEQ ID NO: 8675 - DNA, 25 bp, Homo sapiens
tcggtgcgtgtcgagttccttctcc

SEQ ID NO: 8676 - DNA, 25 bp, Homo sapiens
tggtgcgtgtgtcgcgtcccgcctc

SEQ ID NO: 8677 - DNA, 25 bp, Homo sapiens
cagttaggtgtccagggtaggcatc

SEQ ID NO: 8678 - DNA, 25 bp, Homo sapiens
ccactggtgtgtcgtagggctgaac

SEQ ID NO: 8679 - DNA, 25 bp, Homo sapiens
cctgtgaggtgtcgctgtgtcaacc

SEQ ID NO: 8680 - DNA, 25 bp, Homo sapiens
tcagcagagcgtgtccgtgttgaag

SEQ ID NO: 8681 - DNA, 25 bp, Homo sapiens
acgctggtgctgtccatgggctgcc

SEQ ID NO: 8682 - DNA, 25 bp, Homo sapiens
tgtttgtgtgtctggtgtgtaaatg

SEQ ID NO: 8683 - DNA, 25 bp, Homo sapiens
cttgtccgtgtctctgtgtgcaggc

SEQ ID NO: 8684 - DNA, 25 bp, Homo sapiens
tagcccttgtctgcactggtggaga

SEQ ID NO: 8685 - DNA, 25 bp, Homo sapiens
cctggaggtgtctggcgggtatgta

SEQ ID NO: 8686 - DNA, 25 bp, Homo sapiens
tccaggctgctgtcttgcgagtcca

SEQ ID NO: 8687 - DNA, 25 bp, Homo sapiens
tcttccagatgtccgtgctgtggct

SEQ ID NO: 8688 - DNA, 25 bp, Homo sapiens
tgatggtggtgtcaacatctgctct

SEQ ID NO: 8689 - DNA, 25 bp, Homo sapiens
gatcagccgctgtcacacgcacagt

SEQ ID NO: 8690 - DNA, 25 bp, Homo sapiens
gcatgtgtgtgctgtcagaaagaga

SEQ ID NO: 8691 - DNA, 25 bp, Homo sapiens
aagatgtgtgtgtcatctttgcata

SEQ ID NO: 8692 - DNA, 25 bp, Homo sapiens
caccaggtttgcgtaatgggctgag

SEQ ID NO: 8693 - DNA, 25 bp, Homo sapiens
tattcctttggagcaccacttgggt

SEQ ID NO: 8694 - DNA, 25 bp, Homo sapiens
tattcaggttggctggtagtcacag

SEQ ID NO: 8695 - DNA, 25 bp, Homo sapiens
tgatttggttggttgggacttagtc

SEQ ID NO: 8696 - DNA, 25 bp, Homo sapiens
tccgccgttgggtgtctgagttcgc

SEQ ID NO: 8697 - DNA, 25 bp, Homo sapiens
cccggctttggctgtgtagcctcgg

SEQ ID NO: 8698 - DNA, 25 bp, Homo sapiens
ccaaaggttggattgaaggactgca

SEQ ID NO: 8699 - DNA, 25 bp, Homo sapiens
tatagctgcgttggtggctgccaga

SEQ ID NO: 8700 - DNA, 25 bp, Homo sapiens
cgtgtgtgcagttggcgggcttgtc

SEQ ID NO: 8701 - DNA, 25 bp, Homo sapiens
ctagcctgctgttgggctgcgtttc

SEQ ID NO: 8702 - DNA, 25 bp, Homo sapiens
tgggcgtcttggacggaatccacct

SEQ ID NO: 8703 - DNA, 25 bp, Homo sapiens
tgggattttgtctgtcaagctcatc

SEQ ID NO: 8704 - DNA, 25 bp, Homo sapiens
gccattgtttgtgtgctggtgccaa

SEQ ID NO: 8705 - DNA, 25 bp, Homo sapiens
acgttgcgcttgttgctgaggtagc

SEQ ID NO: 8706 - DNA, 25 bp, Homo sapiens
acaacccttgtacgctggcggctgg

SEQ ID NO: 8707 - DNA, 25 bp, Homo sapiens
gtggctgtgcttgtcctggaccatc

SEQ ID NO: 8708 - DNA, 25 bp, Homo sapiens
cctgggtgcttgttgatgtaatctt

SEQ ID NO: 8709 - DNA, 25 bp, Homo sapiens
cctgcgtggcttgtaaaatctgatg

SEQ ID NO: 8710 - DNA, 25 bp, Homo sapiens
atggcaggatattgggaaatgtttt

SEQ ID NO: 8711 - DNA, 25 bp, Homo sapiens
gatttctttgaacacaaacaccgtg

SEQ ID NO: 8712 - DNA, 25 bp, Homo sapiens
gttttttgaattgtccagtgcctgt

SEQ ID NO: 8713 - DNA, 25 bp, Homo sapiens
catgcagggtgcttgagagattccc

SEQ ID NO: 8714 - DNA, 25 bp, Homo sapiens
gctgcttgctgttgatggctccgcg

SEQ ID NO: 8715 - DNA, 25 bp, Homo sapiens
tctgtgaacattgacggcggctgct

SEQ ID NO: 8716 - DNA, 25 bp, Homo sapiens
ctgatagcgtttgccgttggtgccc

SEQ ID NO: 8717 - DNA, 25 bp, Homo sapiens
gagctgagctgttgctttgaaagcc

SEQ ID NO: 8718 - DNA, 25 bp, Homo sapiens
ccctgcttgttgctgatggcgtcga

SEQ ID NO: 8719 - DNA, 25 bp, Homo sapiens
ggtgcaagattgcacccacaactgg

SEQ ID NO: 8720 - DNA, 25 bp, Homo sapiens
acggccaggtggcacgggagccgcg

SEQ ID NO: 8721 - DNA, 25 bp, Homo sapiens
ccaaggcggctagggcggcgaagtc

SEQ ID NO: 8722 - DNA, 25 bp, Homo sapiens
cataatatccttgcagatgagacac

SEQ ID NO: 8723 - DNA, 25 bp, Homo sapiens
tctccggtgtgtggaggcgaagtct

SEQ ID NO: 8724 - DNA, 25 bp, Homo sapiens
aagagtgatggtggtagcgtatttc

SEQ ID NO: 8725 - DNA, 25 bp, Homo sapiens
atttttggtggtggcgacaatccca

SEQ ID NO: 8726 - DNA, 25 bp, Homo sapiens
tccgtgcggtggtgatagcccttct

SEQ ID NO: 8727 - DNA, 25 bp, Homo sapiens
tgttgtgggtggttgtccctcgaca

SEQ ID NO: 8728 - DNA, 25 bp, Homo sapiens
caggagtgggtggtggctgggtcca

SEQ ID NO: 8729 - DNA, 25 bp, Homo sapiens
tcagatggcggtgggatggtctcca

SEQ ID NO: 8730 - DNA, 25 bp, Homo sapiens
ccttgtgcaggtggtagtcggcctc

SEQ ID NO: 8731 - DNA, 25 bp, Homo sapiens
ctggagcagtggtggaagccacccc

SEQ ID NO: 8732 - DNA, 25 bp, Homo sapiens
atagttgctggtggtacattataga

SEQ ID NO: 8733 - DNA, 25 bp, Homo sapiens
tcagcggcaggtggatctgtgcggg

SEQ ID NO: 8734 - DNA, 25 bp, Homo sapiens
ctcctgtgccgtgggtggtgtcccc

SEQ ID NO: 8735 - DNA, 25 bp, Homo sapiens
aaaggcagcgtggtgcccaattaaa

SEQ ID NO: 8736 - DNA, 25 bp, Homo sapiens
ttcacaaggtggtgtcgctgaggcc

SEQ ID NO: 8737 - DNA, 25 bp, Homo sapiens
aacccaggtggtgatgcgtgtgctc

SEQ ID NO: 8738 - DNA, 25 bp, Homo sapiens
gtgcaggcggtggagtacaacatct

SEQ ID NO: 8739 - DNA, 25 bp, Homo sapiens
cagaggcagggtggattctatcacc

SEQ ID NO: 8740 - DNA, 25 bp, Homo sapiens
tctcaggcaggtggacaattacagt

SEQ ID NO: 8741 - DNA, 25 bp, Homo sapiens
tagttgctggtggtacattatagaa

SEQ ID NO: 8742 - DNA, 25 bp, Homo sapiens
caggatcagtggtggccaggtcacc

SEQ ID NO: 8743 - DNA, 25 bp, Homo sapiens
cacctaccgtggatggatgcatgcg

SEQ ID NO: 8744 - DNA, 25 bp, Homo sapiens
catagaggcggtggcttcatcaagg

SEQ ID NO: 8745 - DNA, 25 bp, Homo sapiens
agggcatcgcgtgggtgtgaggctc

SEQ ID NO: 8746 - DNA, 25 bp, Homo sapiens
tcaggcccgtggaattgatcaccag

SEQ ID NO: 8747 - DNA, 25 bp, Homo sapiens
tgctgcgagacgtggtggtggactt

SEQ ID NO: 8748 - DNA, 25 bp, Homo sapiens
ttcatgatcggtggctgctaagctc

SEQ ID NO: 8749 - DNA, 25 bp, Homo sapiens
tgtgttggcgtggaaatcttctgac

SEQ ID NO: 8750 - DNA, 25 bp, Homo sapiens
ggtgcggcgtgagtcccaattcaaa

SEQ ID NO: 8751 - DNA, 25 bp, Homo sapiens
tgatggcctgcgtggctcctgttgt

SEQ ID NO: 8752 - DNA, 25 bp, Homo sapiens
ccagaagggtgtggctttggcatca

SEQ ID NO: 8753 - DNA, 25 bp, Homo sapiens
tcagggcggtgttatcgcgcagtta

SEQ ID NO: 8754 - DNA, 25 bp, Homo sapiens
tcgtggtggtgttctgcagcgcaat

SEQ ID NO: 8755 - DNA, 25 bp, Homo sapiens
tcctgcgtggtgtgagggtttcaac

SEQ ID NO: 8756 - DNA, 25 bp, Homo sapiens
catctgtggcaggtgtttatccgcc

SEQ ID NO: 8757 - DNA, 25 bp, Homo sapiens
tgaggctgctggtgttatcttctgg

SEQ ID NO: 8758 - DNA, 25 bp, Homo sapiens
cccgtgtgcgtgtgtgtccttggcc

SEQ ID NO: 8759 - DNA, 25 bp, Homo sapiens
cagaaggcggtgtctcaaaagggat

SEQ ID NO: 8760 - DNA, 25 bp, Homo sapiens
catgggctgggtgtgatagtcctac

SEQ ID NO: 8761 - DNA, 25 bp, Homo sapiens
atatatatgggtgtgcgagtgtgta

SEQ ID NO: 8762 - DNA, 25 bp, Homo sapiens
caagtgtgcggtgtgccctttgacc

SEQ ID NO: 8763 - DNA, 25 bp, Homo sapiens
attctggcaggtgtgttgcagaaat

SEQ ID NO: 8764 - DNA, 25 bp, Homo sapiens
cacattctgtggtgtgtgcagtaca

SEQ ID NO: 8765 - DNA, 25 bp, Homo sapiens
cattgactctggtgtgtgaaggccc

SEQ ID NO: 8766 - DNA, 25 bp, Homo sapiens
agggtgggtgtgcaaaatgttcacc

SEQ ID NO: 8767 - DNA, 25 bp, Homo sapiens
ctcctatacgctggacgcgggtcgg

SEQ ID NO: 8768 - DNA, 25 bp, Homo sapiens
catgcgcagtgtggtgtggacaggg

SEQ ID NO: 8769 - DNA, 25 bp, Homo sapiens
tgatgcgttcgtgtgactcccaggt

SEQ ID NO: 8770 - DNA, 25 bp, Homo sapiens
cagggctggcgtgttgatgtccaca

SEQ ID NO: 8771 - DNA, 25 bp, Homo sapiens
gcctgcgtgcgtgtggtgaactcct

SEQ ID NO: 8772 - DNA, 25 bp, Homo sapiens
tcagtacagcgtgtgcatgtggacc

SEQ ID NO: 8773 - DNA, 25 bp, Homo sapiens
caaatcggcgtgtgcgtactctgaa

SEQ ID NO: 8774 - DNA, 25 bp, Homo sapiens
caccaatgatgcgtgtggacagggc

SEQ ID NO: 8775 - DNA, 25 bp, Homo sapiens
cgcgtggctgagtggtgtttacatt

SEQ ID NO: 8776 - DNA, 25 bp, Homo sapiens
cagtgcctctagtggttgctgggaa

SEQ ID NO: 8777 - DNA, 25 bp, Homo sapiens
caattttagtggatcagatgctcag

SEQ ID NO: 8778 - DNA, 25 bp, Homo sapiens
gaatcctcagtggtgtgctgtgttg

SEQ ID NO: 8779 - DNA, 25 bp, Homo sapiens
tgatctcccagtggtgtgtgcgtgc

SEQ ID NO: 8780 - DNA, 25 bp, Homo sapiens
gtctgtgacagtggagaagattccc

SEQ ID NO: 8781 - DNA, 25 bp, Homo sapiens
tcggagtgagtgtgtgcgcggccgc

SEQ ID NO: 8782 - DNA, 25 bp, Homo sapiens
tgtgcacgtgtgtgggtaaacattg

SEQ ID NO: 8783 - DNA, 25 bp, Homo sapiens
tgagtggtggtgacatctaggtcca

SEQ ID NO: 8784 - DNA, 25 bp, Homo sapiens
gatgtctccgtgagtctgtgcctcc

SEQ ID NO: 8785 - DNA, 25 bp, Homo sapiens
tgcagtgtgccgtgagtaggttaca

SEQ ID NO: 8786 - DNA, 25 bp, Homo sapiens
tcacacatgcacgtgaaactccagt

SEQ ID NO: 8787 - DNA, 25 bp, Homo sapiens
tgtgtgtgtggtgattagcatgcct

SEQ ID NO: 8788 - DNA, 25 bp, Homo sapiens
gtctgctgcagcgtgaggccacact

SEQ ID NO: 8789 - DNA, 25 bp, Homo sapiens
tctttgtagtgaggcggcaggtacc

SEQ ID NO: 8790 - DNA, 25 bp, Homo sapiens
caccgacttgtggtaggcggcgtcc

SEQ ID NO: 8791 - DNA, 25 bp, Homo sapiens
ccaaaggcagtgaggtatttcctga

SEQ ID NO: 8792 - DNA, 25 bp, Homo sapiens
tgcaaggcgtgtgtgtactactatc

SEQ ID NO: 8793 - DNA, 25 bp, Homo sapiens
attttagtgtgtgtgctactcaagc

SEQ ID NO: 8794 - DNA, 25 bp, Homo sapiens
cagcgggtgtgtggcgtttcggctc

SEQ ID NO: 8795 - DNA, 25 bp, Homo sapiens
cctgggcagtgtggtgaggctccat

SEQ ID NO: 8796 - DNA, 25 bp, Homo sapiens
cattcagtggtgtgggtggttaggc

SEQ ID NO: 8797 - DNA, 25 bp, Homo sapiens
tgtgcacctgtgtgggatcctcagt

SEQ ID NO: 8798 - DNA, 25 bp, Homo sapiens
tgtgcgcctgtgtgggtgcacattt

SEQ ID NO: 8799 - DNA, 25 bp, Homo sapiens
tgggctgtgtgtggcgccctttcct

SEQ ID NO: 8800 - DNA, 25 bp, Homo sapiens
gtgtctctgtgtggttttgtctgtg

SEQ ID NO: 8801 - DNA, 25 bp, Homo sapiens
tgtgtgtctgtgtggttttgtctgt

SEQ ID NO: 8802 - DNA, 25 bp, Homo sapiens
gagggtgtgtgtgttagtgtgagtg

SEQ ID NO: 8803 - DNA, 25 bp, Homo sapiens
acgcaggcgtgtggctctcgttcat

SEQ ID NO: 8804 - DNA, 25 bp, Homo sapiens
cttggactctgtggtgtgtgcttga

SEQ ID NO: 8805 - DNA, 25 bp, Homo sapiens
tctgtgaggtgtggcacggcgtctg

SEQ ID NO: 8806 - DNA, 25 bp, Homo sapiens
cagcagtgccctgtggttgagcaca

SEQ ID NO: 8807 - DNA, 25 bp, Homo sapiens
tcctccctgtgtggtgcacgatgga

SEQ ID NO: 8808 - DNA, 25 bp, Homo sapiens
ccactgtggctgtggttccacggtg

SEQ ID NO: 8809 - DNA, 25 bp, Homo sapiens
ctccggtgctgtgtgcgaaccagag

SEQ ID NO: 8810 - DNA, 25 bp, Homo sapiens
cttcttcgtgtgtgtgtcttggcct

SEQ ID NO: 8811 - DNA, 25 bp, Homo sapiens
aaggcgtgtgtgtactactatcatc

SEQ ID NO: 8812 - DNA, 25 bp, Homo sapiens
cattagcatcctgtggctgcggtca

SEQ ID NO: 8813 - DNA, 25 bp, Homo sapiens
tctgcatgcggctgtgggtcacatt

SEQ ID NO: 8814 - DNA, 25 bp, Homo sapiens
tgtgtgtttgtgtccgtgtgcatgt

SEQ ID NO: 8815 - DNA, 25 bp, Homo sapiens
actggttgtgtgtggcatgggtctt

SEQ ID NO: 8816 - DNA, 25 bp, Homo sapiens
tgtatgagtgtgtgtctgaatgagt

SEQ ID NO: 8817 - DNA, 25 bp, Homo sapiens
agtcccgtgtgtgccccttacagtg

SEQ ID NO: 8818 - DNA, 25 bp, Homo sapiens
gtgagtggtgtgtgcccatggtccc

SEQ ID NO: 8819 - DNA, 25 bp, Homo sapiens
ggacatggtgtgtggttcttttagc

SEQ ID NO: 8820 - DNA, 25 bp, Homo sapiens
cacgctggcttgtgtgtgggatacc

SEQ ID NO: 8821 - DNA, 25 bp, Homo sapiens
cacgaatgtgtgtgtgccaaggccc

SEQ ID NO: 8822 - DNA, 25 bp, Homo sapiens
tgatgctgacctgtgtggcctaagg

SEQ ID NO: 8823 - DNA, 25 bp, Homo sapiens
ccagtgtgcgatgtgtgtcttcaaa

SEQ ID NO: 8824 - DNA, 25 bp, Homo sapiens
cgggtgtgatgtgtctggtcattac

SEQ ID NO: 8825 - DNA, 25 bp, Homo sapiens
tgcatgcttgctgtgtgtgtgtgct

SEQ ID NO: 8826 - DNA, 25 bp, Homo sapiens
agtttagtgtgtgtgctgccagagc

SEQ ID NO: 8827 - DNA, 25 bp, Homo sapiens
ggaatgtgtgtgtgctatagtttca

SEQ ID NO: 8828 - DNA, 25 bp, Homo sapiens
tttagtgtgtgtgctgccagagcaa

SEQ ID NO: 8829 - DNA, 25 bp, Homo sapiens
gtttagtgtgtgtgctgccagagca

SEQ ID NO: 8830 - DNA, 25 bp, Homo sapiens
agtgcaaagtgtgtgcaataggatc

SEQ ID NO: 8831 - DNA, 25 bp, Homo sapiens
catttgtgcctgtgtggccctcaaa

SEQ ID NO: 8832 - DNA, 25 bp, Homo sapiens
cgcttgctgtgtgtgtgctagctgt

SEQ ID NO: 8833 - DNA, 25 bp, Homo sapiens
tattctgcctgtgtgggtagcagca

SEQ ID NO: 8834 - DNA, 25 bp, Homo sapiens
gtgtggaatgtggtgtgtgagaatg

SEQ ID NO: 8835 - DNA, 25 bp, Homo sapiens
gtgtgtgaatgtgtctatgaatatg

SEQ ID NO: 8836 - DNA, 25 bp, Homo sapiens
tatgtcccatgtggtccaggcttag

SEQ ID NO: 8837 - DNA, 25 bp, Homo sapiens
gatgtgcgacatgtggtgccccgac

SEQ ID NO: 8838 - DNA, 25 bp, Homo sapiens
tgtggcgtgcatgtgtcagaactcc

SEQ ID NO: 8839 - DNA, 25 bp, Homo sapiens
tgtgtgctagctgtgtgtgcatgct

SEQ ID NO: 8840 - DNA, 25 bp, Homo sapiens
caaatggtgcatgtgtgcgcgaacg

SEQ ID NO: 8841 - DNA, 25 bp, Homo sapiens
agacgtgtgtgtgagccagccttgc

SEQ ID NO: 8842 - DNA, 25 bp, Homo sapiens
gaaaggtgtgaacacacacagccag

SEQ ID NO: 8843 - DNA, 25 bp, Homo sapiens
tcatggtgtgtgtgaaactcaaatt

SEQ ID NO: 8844 - DNA, 25 bp, Homo sapiens
gtgttagtgtgagtgtatgtgggag

SEQ ID NO: 8845 - DNA, 25 bp, Homo sapiens
caacacacactgtgactcgggactg

SEQ ID NO: 8846 - DNA, 25 bp, Homo sapiens
ccacttctgtgtgagatgccgggct

SEQ ID NO: 8847 - DNA, 25 bp, Homo sapiens
caccacacactgtgagatccttgag

SEQ ID NO: 8848 - DNA, 25 bp, Homo sapiens
tgtctgcagcctgtgagcaatcacc

SEQ ID NO: 8849 - DNA, 25 bp, Homo sapiens
gctcatgtgtgcatgtgaaaaccca

SEQ ID NO: 8850 - DNA, 25 bp, Homo sapiens
cctaaggctgtgctgtccactatga

SEQ ID NO: 8851 - DNA, 25 bp, Homo sapiens
caggtgtgagtgtgatgtcattctc

SEQ ID NO: 8852 - DNA, 25 bp, Homo sapiens
cacgtgtgagatgtgagtgcctgtg

SEQ ID NO: 8853 - DNA, 25 bp, Homo sapiens
gcggcgtggtgctgaccgcctacca

SEQ ID NO: 8854 - DNA, 25 bp, Homo sapiens
tgcttgtccgtgcgtctgtctgcct

SEQ ID NO: 8855 - DNA, 25 bp, Homo sapiens
ttgagtgtgcatgtgatatgtgaac

SEQ ID NO: 8856 - DNA, 25 bp, Homo sapiens
gtctgtgctcgtgctactaataaag

SEQ ID NO: 8857 - DNA, 25 bp, Homo sapiens
gacctgtggtgcctgtggtggctca

SEQ ID NO: 8858 - DNA, 25 bp, Homo sapiens
tagagcgggtgctggtgcgtgcagc

SEQ ID NO: 8859 - DNA, 25 bp, Homo sapiens
cattgctgtgcggtgcttgagtgcc

SEQ ID NO: 8860 - DNA, 25 bp, Homo sapiens
tgagttgctggtgctcacaccggtg

SEQ ID NO: 8861 - DNA, 25 bp, Homo sapiens
tcccgctggtgctggagtacgcact

SEQ ID NO: 8862 - DNA, 25 bp, Homo sapiens
cacctcaccagtgccatctgtcaaa

SEQ ID NO: 8863 - DNA, 25 bp, Homo sapiens
cacgtccgtgtgcatgtactggtca

SEQ ID NO: 8864 - DNA, 25 bp, Homo sapiens
cactcaggctgcgtgctgcatggat

SEQ ID NO: 8865 - DNA, 25 bp, Homo sapiens
cacgttagtgtgcaggcatgttgcc

SEQ ID NO: 8866 - DNA, 25 bp, Homo sapiens
cctgtgtgggtgcacatttgtgtgt

SEQ ID NO: 8867 - DNA, 25 bp, Homo sapiens
tgcgtgagtgcagtgcctttgcgct

SEQ ID NO: 8868 - DNA, 25 bp, Homo sapiens
tctccaggatgtgcgagagcctgcc

SEQ ID NO: 8869 - DNA, 25 bp, Homo sapiens
atttacgagtgctgtgctggcggcc

SEQ ID NO: 8870 - DNA, 25 bp, Homo sapiens
atgtgtgcctgtgtgcgtccgcgcg

SEQ ID NO: 8871 - DNA, 25 bp, Homo sapiens
cttgtgcgtgtgtgccttctagggc

SEQ ID NO: 8872 - DNA, 25 bp, Homo sapiens
tgcgtcttgtgtgctggtttcccgt

SEQ ID NO: 8873 - DNA, 25 bp, Homo sapiens
tgcgtgcgcgtgtgccgttctctag

SEQ ID NO: 8874 - DNA, 25 bp, Homo sapiens
tgtgaaggtgtgcagagtaccaata

SEQ ID NO: 8875 - DNA, 25 bp, Homo sapiens
catgtgtgcctgtgtgcgtccgcgc

SEQ ID NO: 8876 - DNA, 25 bp, Homo sapiens
cgggctgcgtgtgccagaagagcat

SEQ ID NO: 8877 - DNA, 25 bp, Homo sapiens
gactcggagtgcatcaggctgctac

SEQ ID NO: 8878 - DNA, 25 bp, Homo sapiens
gaggatgtgtgtgcagaattcactc

SEQ ID NO: 8879 - DNA, 25 bp, Homo sapiens
atgcctgtgaatgtgcgtgtgcatg

SEQ ID NO: 8880 - DNA, 25 bp, Homo sapiens
ttagtgtgtgtgctgccagagcaag

SEQ ID NO: 8881 - DNA, 25 bp, Homo sapiens
catgtgagggtgtgcacgcatgtat

SEQ ID NO: 8882 - DNA, 25 bp, Homo sapiens
caagctggtgctgtgcaggtttcct

SEQ ID NO: 8883 - DNA, 25 bp, Homo sapiens
cagagacatgcgtgtgctgcctttc

SEQ ID NO: 8884 - DNA, 25 bp, Homo sapiens
tgtaagtgatgtgcttgtgctgcca

SEQ ID NO: 8885 - DNA, 25 bp, Homo sapiens
aacacaactgtgctgtggtccatgc

SEQ ID NO: 8886 - DNA, 25 bp, Homo sapiens
tttagtgcatgtgctgctgaaacga

SEQ ID NO: 8887 - DNA, 25 bp, Homo sapiens
ggcagccttgtgcagtgcagtctca

SEQ ID NO: 8888 - DNA, 25 bp, Homo sapiens
cagatgtgggctgtgctcattcttc

SEQ ID NO: 8889 - DNA, 25 bp, Homo sapiens
tgtgtgggcatgtgcctgctcccac

SEQ ID NO: 8890 - DNA, 25 bp, Homo sapiens
tgactaccctacgttctcctacaaa

SEQ ID NO: 8891 - DNA, 25 bp, Homo sapiens
gcaatcagtgctgtgcattaagtat

SEQ ID NO: 8892 - DNA, 25 bp, Homo sapiens
gcacaccacctttgcactgtctgta

SEQ ID NO: 8893 - DNA, 25 bp, Homo sapiens
gccacacaccttctctggtgtacat

SEQ ID NO: 8894 - DNA, 25 bp, Homo sapiens
tcatgcgaaccttctatgcattgtt

SEQ ID NO: 8895 - DNA, 25 bp, Homo sapiens
tttcttgccttgctggtaagatttc

SEQ ID NO: 8896 - DNA, 25 bp, Homo sapiens
tgggcgtccttgctgacctcgtaga

SEQ ID NO: 8897 - DNA, 25 bp, Homo sapiens
ggtcgtccttgcctttgctatccac

SEQ ID NO: 8898 - DNA, 25 bp, Homo sapiens
tgcaggcaggccttgtcatatctcc

SEQ ID NO: 8899 - DNA, 25 bp, Homo sapiens
gggcgtgacttcacacacagtcggg

SEQ ID NO: 8900 - DNA, 25 bp, Homo sapiens
tgctgacaccacttttctctctggc

SEQ ID NO: 8901 - DNA, 25 bp, Homo sapiens
gccacacacacttcactgcgtttat

SEQ ID NO: 8902 - DNA, 25 bp, Homo sapiens
catgacaaacacttaacagagtagt

SEQ ID NO: 8903 - DNA, 25 bp, Homo sapiens
tatccccacttaacacacgcatgaa

SEQ ID NO: 8904 - DNA, 25 bp, Homo sapiens
tcacagacagcacttattaaatcag

SEQ ID NO: 8905 - DNA, 25 bp, Homo sapiens
agccaccacacttggtcaactattt

SEQ ID NO: 8906 - DNA, 25 bp, Homo sapiens
tgcacccagcctaaattcaaaatct

SEQ ID NO: 8907 - DNA, 25 bp, Homo sapiens
cacaacacgcctacagaacagcaaa

SEQ ID NO: 8908 - DNA, 25 bp, Homo sapiens
cgatgcaaccctagcgatcagtggg

SEQ ID NO: 8909 - DNA, 25 bp, Homo sapiens
gaggatggcctatctcacacatgaa

SEQ ID NO: 8910 - DNA, 25 bp, Homo sapiens
gctcacagaactacacacgcaaggt

SEQ ID NO: 8911 - DNA, 25 bp, Homo sapiens
tcattcacacactaatctacccatt

SEQ ID NO: 8912 - DNA, 25 bp, Homo sapiens
gcaccaccactaggaagaaggccag

SEQ ID NO: 8913 - DNA, 25 bp, Homo sapiens
tgggcacacactatacccctgatgg

SEQ ID NO: 8914 - DNA, 25 bp, Homo sapiens
tacacacacactacagcatacaaaa

SEQ ID NO: 8915 - DNA, 25 bp, Homo sapiens
cgataacgcactactttcacaccag

SEQ ID NO: 8916 - DNA, 25 bp, Homo sapiens
actgtttcactactcagcatggaaa

SEQ ID NO: 8917 - DNA, 25 bp, Homo sapiens
gatgtccttcttttcggccagccag

SEQ ID NO: 8918 - DNA, 25 bp, Homo sapiens
gacgccctcttcatcataggggtca

SEQ ID NO: 8919 - DNA, 25 bp, Homo sapiens
tgtgtgtgtgcatcttaaaataggg

SEQ ID NO: 8920 - DNA, 25 bp, Homo sapiens
catatatgtcatctctagaacgaag

SEQ ID NO: 8921 - DNA, 25 bp, Homo sapiens
taatgggcatctacagcagggctgc

SEQ ID NO: 8922 - DNA, 25 bp, Homo sapiens
caccagcagagcctccgggaggtga

SEQ ID NO: 8923 - DNA, 25 bp, Homo sapiens
aagatgcagccctcggtttccatga

SEQ ID NO: 8924 - DNA, 25 bp, Homo sapiens
ctcctcggcctccttatgtgtggca

SEQ ID NO: 8925 - DNA, 25 bp, Homo sapiens
tgtgtctgtgcctcgactttctgtg

SEQ ID NO: 8926 - DNA, 25 bp, Homo sapiens
acacacatgctcctctcaagagtca

SEQ ID NO: 8927 - DNA, 25 bp, Homo sapiens
tcacacacgactccaacgggattgt

SEQ ID NO: 8928 - DNA, 25 bp, Homo sapiens
tcgccgcacactccatagaacttga

SEQ ID NO: 8929 - DNA, 25 bp, Homo sapiens
gacacacgcactcttatggccggtg

SEQ ID NO: 8930 - DNA, 25 bp, Homo sapiens
acatgcggcaactcgcacactcagg

SEQ ID NO: 8931 - DNA, 25 bp, Homo sapiens
ttcaaccactcgacagcagaaagag

SEQ ID NO: 8932 - DNA, 25 bp, Homo sapiens
gttcctgataagtgcgtgtggtgat

SEQ ID NO: 8933 - DNA, 25 bp, Homo sapiens
gaacccctcacgcactcagatttga

SEQ ID NO: 8934 - DNA, 25 bp, Homo sapiens
agctacgcacactcaactaatctgg

SEQ ID NO: 8935 - DNA, 25 bp, Homo sapiens
tggagctgccctcacacaactagtg

SEQ ID NO: 8936 - DNA, 25 bp, Homo sapiens
gtggctcacctcacacacgcgtgtg

SEQ ID NO: 8937 - DNA, 25 bp, Homo sapiens
gtgtgtgtgcctcaaggacctggtc

SEQ ID NO: 8938 - DNA, 25 bp, Homo sapiens
tgtactcacactcagactggttgtc

SEQ ID NO: 8939 - DNA, 25 bp, Homo sapiens
tccacaccactcatacagctagata

SEQ ID NO: 8940 - DNA, 25 bp, Homo sapiens
gtggagctcactcacacaggataac

SEQ ID NO: 8941 - DNA, 25 bp, Homo sapiens
cctcctgctcctgcccctcctgccc

SEQ ID NO: 8942 - DNA, 25 bp, Homo sapiens
gaatcatccactcacacagaggctg

SEQ ID NO: 8943 - DNA, 25 bp, Homo sapiens
ggaaactctcctagtggccctgaaa

SEQ ID NO: 8944 - DNA, 25 bp, Homo sapiens
tccagctgcaggctgctgttgcgct

SEQ ID NO: 8945 - DNA, 25 bp, Homo sapiens
acagcaatggtctcacacacgtggg

SEQ ID NO: 8946 - DNA, 25 bp, Homo sapiens
agacacacctctcatgaacacattg

SEQ ID NO: 8947 - DNA, 25 bp, Homo sapiens
gcagtggcggctttctctccttctt

SEQ ID NO: 8948 - DNA, 25 bp, Homo sapiens
tcagggctggctttgaaggaattgc

SEQ ID NO: 8949 - DNA, 25 bp, Homo sapiens
gagcctgggctttctcgaacatcag

SEQ ID NO: 8950 - DNA, 25 bp, Homo sapiens
ttcttgtggctttggctaaatagag

SEQ ID NO: 8951 - DNA, 25 bp, Homo sapiens
gcgccttggcttgccgggccttacg

SEQ ID NO: 8952 - DNA, 25 bp, Homo sapiens
gctgccgggcttgctactgcttctg

SEQ ID NO: 8953 - DNA, 25 bp, Homo sapiens
ctcggtgtggcttgtatatcagttg

SEQ ID NO: 8954 - DNA, 25 bp, Homo sapiens
gcagagcagtagctttgattacgta

SEQ ID NO: 8955 - DNA, 25 bp, Homo sapiens
tctgtgctgggctagggcaatctcg

SEQ ID NO: 8956 - DNA, 25 bp, Homo sapiens
cgtctgctgcggctagtgagttcaa

SEQ ID NO: 8957 - DNA, 25 bp, Homo sapiens
cgtgacgggctatttggcaaagaca

SEQ ID NO: 8958 - DNA, 25 bp, Homo sapiens
ttgctgggtgcttctgtgagctcag

SEQ ID NO: 8959 - DNA, 25 bp, Homo sapiens
cagaggctggtgcttagcttctcac

SEQ ID NO: 8960 - DNA, 25 bp, Homo sapiens
caaagtgtgtgcttacagatgtccc

SEQ ID NO: 8961 - DNA, 25 bp, Homo sapiens
gttgctgtgtgctagctgtgtgtac

SEQ ID NO: 8962 - DNA, 25 bp, Homo sapiens
cacgctgggctgcttggaatacatg

SEQ ID NO: 8963 - DNA, 25 bp, Homo sapiens
gctgaaggctgcttgtggttccaca

SEQ ID NO: 8964 - DNA, 25 bp, Homo sapiens
tagtgtgtgtgctactcaagcaagc

SEQ ID NO: 8965 - DNA, 25 bp, Homo sapiens
tcataacaagctcacacatgcgcgt

SEQ ID NO: 8966 - DNA, 25 bp, Homo sapiens
agtggcggctgctagctctcggact

SEQ ID NO: 8967 - DNA, 25 bp, Homo sapiens
tgcttgcttgtgctatagctttggg

SEQ ID NO: 8968 - DNA, 25 bp, Homo sapiens
tgagatgctgtgctgctaccctcgg

SEQ ID NO: 8969 - DNA, 25 bp, Homo sapiens
gggcatgtgtgctatctgggtacag

SEQ ID NO: 8970 - DNA, 25 bp, Homo sapiens
tgagacacaggctcccacaatggag

SEQ ID NO: 8971 - DNA, 25 bp, Homo sapiens
ggagcagcggctctatcctttgccc

SEQ ID NO: 8972 - DNA, 25 bp, Homo sapiens
cgggctgggctctgctaattatcta

SEQ ID NO: 8973 - DNA, 25 bp, Homo sapiens
tacacccagctcctctcatcggtgg

SEQ ID NO: 8974 - DNA, 25 bp, Homo sapiens
gctggagtgagctcgacactaaccc

SEQ ID NO: 8975 - DNA, 25 bp, Homo sapiens
tgcaggcggcgctctatcggggtca

SEQ ID NO: 8976 - DNA, 25 bp, Homo sapiens
caggctggtgagctcttaaagagac

SEQ ID NO: 8977 - DNA, 25 bp, Homo sapiens
aacaggcggctcagaagggttcgca

SEQ ID NO: 8978 - DNA, 25 bp, Homo sapiens
gtcacagggctcacaagacatgaag

SEQ ID NO: 8979 - DNA, 25 bp, Homo sapiens
gggtccgctcacacatatgcagaac

SEQ ID NO: 8980 - DNA, 25 bp, Homo sapiens
tacaagacgctcaacagggaaggct

SEQ ID NO: 8981 - DNA, 25 bp, Homo sapiens
gaggcggcgctcagcggtacttctc

SEQ ID NO: 8982 - DNA, 25 bp, Homo sapiens
gagcgcagcacgctcaccactgtgt

SEQ ID NO: 8983 - DNA, 25 bp, Homo sapiens
tattccgtgctcacacccgatgtat

SEQ ID NO: 8984 - DNA, 25 bp, Homo sapiens
tgagtgtgtgtgctctgtctagtgt

SEQ ID NO: 8985 - DNA, 25 bp, Homo sapiens
ggtgaggtgctcaggtacatactcc

SEQ ID NO: 8986 - DNA, 25 bp, Homo sapiens
catgggctggtgctcatctgagttc

SEQ ID NO: 8987 - DNA, 25 bp, Homo sapiens
ccagtggctgtgctctagtcattca

SEQ ID NO: 8988 - DNA, 25 bp, Homo sapiens
catgcgggtctgctcacacatatgc

SEQ ID NO: 8989 - DNA, 25 bp, Homo sapiens
caggaggagctgctctcgccgttct

SEQ ID NO: 8990 - DNA, 25 bp, Homo sapiens
ggcaagcacatgctcacagcacctg

SEQ ID NO: 8991 - DNA, 25 bp, Homo sapiens
ttacaacctgggcatcaagaccttc

SEQ ID NO: 8992 - DNA, 25 bp, Homo sapiens
ttggtccctggagtgtcccgagctg

SEQ ID NO: 8993 - DNA, 25 bp, Homo sapiens
ccgggccctggaggtctatctgctg

SEQ ID NO: 8994 - DNA, 25 bp, Homo sapiens
gggtccctggcagttaccgagcgcc

SEQ ID NO: 8995 - DNA, 25 bp, Homo sapiens
cacctgtggcctggtgtgggatcca

SEQ ID NO: 8996 - DNA, 25 bp, Homo sapiens
ccattctctgcctggtgcagctttc

SEQ ID NO: 8997 - DNA, 25 bp, Homo sapiens
catagcctgccctgtggaaagctga

SEQ ID NO: 8998 - DNA, 25 bp, Homo sapiens
gcccgtgcctgtctgtgtggaaaaa

SEQ ID NO: 8999 - DNA, 25 bp, Homo sapiens
tcaggccacctgtgtgggtgcatac

SEQ ID NO: 9000 - DNA, 25 bp, Homo sapiens
agactgtgtcctgtgtggccgtgca

SEQ ID NO: 9001 - DNA, 25 bp, Homo sapiens
aaggctgcatcctgtgtgcctccag

SEQ ID NO: 9002 - DNA, 25 bp, Homo sapiens
cgcgcctggcctgtgtgctgagttt

SEQ ID NO: 9003 - DNA, 25 bp, Homo sapiens
acagtttactggtcaggtggcccca

SEQ ID NO: 9004 - DNA, 25 bp, Homo sapiens
gtagtggcctgtgcctatagcctca

SEQ ID NO: 9005 - DNA, 25 bp, Homo sapiens
cagcggtagactggacaaatggcac

SEQ ID NO: 9006 - DNA, 25 bp, Homo sapiens
caggaccacactgtgaggaccacca

SEQ ID NO: 9007 - DNA, 25 bp, Homo sapiens
ccagagggcctgatccctgcagttt

SEQ ID NO: 9008 - DNA, 25 bp, Homo sapiens
cctctgggcctgagtaaaccatgtg

SEQ ID NO: 9009 - DNA, 25 bp, Homo sapiens
tgcaggctggactgaatactttgct

SEQ ID NO: 9010 - DNA, 25 bp, Homo sapiens
taccacacactgaaacatacaatac

SEQ ID NO: 9011 - DNA, 25 bp, Homo sapiens
ccttctgtgactgaagcacacacac

SEQ ID NO: 9012 - DNA, 25 bp, Homo sapiens
tttccagactgagcatgcacgcacg

SEQ ID NO: 9013 - DNA, 25 bp, Homo sapiens
gctattcaatctggccaaaacggtg

SEQ ID NO: 9014 - DNA, 25 bp, Homo sapiens
cacttgcttgtctggcgtgacgggt

SEQ ID NO: 9015 - DNA, 25 bp, Homo sapiens
tagatggtgtctggtgcaaagcaaa

SEQ ID NO: 9016 - DNA, 25 bp, Homo sapiens
gaagccctctggatctgtgaacccg

SEQ ID NO: 9017 - DNA, 25 bp, Homo sapiens
taagatggctctggccctgtgtgga

SEQ ID NO: 9018 - DNA, 25 bp, Homo sapiens
gtgtgcgtgtctgtgcgctcccgcc

SEQ ID NO: 9019 - DNA, 25 bp, Homo sapiens
agtgtgtgtctctgtcagtctgatc

SEQ ID NO: 9020 - DNA, 25 bp, Homo sapiens
ggcagtggtctgtgcccgtgccaat

SEQ ID NO: 9021 - DNA, 25 bp, Homo sapiens
tgctgtatgactctgtgtgtgtgtc

SEQ ID NO: 9022 - DNA, 25 bp, Homo sapiens
aattctatctctgtgctgtggctgc

SEQ ID NO: 9023 - DNA, 25 bp, Homo sapiens
catgcatggtgcctctgtgtgtggt

SEQ ID NO: 9024 - DNA, 25 bp, Homo sapiens
tgaggtgtgatctgttactgaaggc

SEQ ID NO: 9025 - DNA, 25 bp, Homo sapiens
tctccgtatctgtgtgtgtgaagct

SEQ ID NO: 9026 - DNA, 25 bp, Homo sapiens
aggctccagcctgcggcagcacaat

SEQ ID NO: 9027 - DNA, 25 bp, Homo sapiens
tggtctgtgcctgcgctcagcggtg

SEQ ID NO: 9028 - DNA, 25 bp, Homo sapiens
cagacaatacctgctccaggcatgt

SEQ ID NO: 9029 - DNA, 25 bp, Homo sapiens
tcctggtcctgctggtgcatcttgc

SEQ ID NO: 9030 - DNA, 25 bp, Homo sapiens
ttcgacacactgcacagcttcggga

SEQ ID NO: 9031 - DNA, 25 bp, Homo sapiens
gacttccctgcaacaacagcaatgg

SEQ ID NO: 9032 - DNA, 25 bp, Homo sapiens
cttcgacacactgcacagcttcggg

SEQ ID NO: 9033 - DNA, 25 bp, Homo sapiens
gaaaaactgcatacacacatacgtg

SEQ ID NO: 9034 - DNA, 25 bp, Homo sapiens
tagggttctgccagaaatgtcaatc

SEQ ID NO: 9035 - DNA, 25 bp, Homo sapiens
tgtgagcaggtctgcgtgaactccc

SEQ ID NO: 9036 - DNA, 25 bp, Homo sapiens
aatagaaggctggtgcgcttgggcc

SEQ ID NO: 9037 - DNA, 25 bp, Homo sapiens
gaaatgacgctggtgctgtacgccg

SEQ ID NO: 9038 - DNA, 25 bp, Homo sapiens
cccctggagctgtgtttaggtctaa

SEQ ID NO: 9039 - DNA, 25 bp, Homo sapiens
acagcttggtgctgggtacaccagg

SEQ ID NO: 9040 - DNA, 25 bp, Homo sapiens
gatggtggcgctgggtttatcccct

SEQ ID NO: 9041 - DNA, 25 bp, Homo sapiens
gctgaggaggctggcatattgcaac

SEQ ID NO: 9042 - DNA, 25 bp, Homo sapiens
ccattggtggctgtttaggcaggca

SEQ ID NO: 9043 - DNA, 25 bp, Homo sapiens
aacaccggctgtggcgctgctttac

SEQ ID NO: 9044 - DNA, 25 bp, Homo sapiens
tctggtgcaggctgggtgaccttcc

SEQ ID NO: 9045 - DNA, 25 bp, Homo sapiens
tcaatggtggctggtgatattggat

SEQ ID NO: 9046 - DNA, 25 bp, Homo sapiens
cgggcagggctgtaggcatcaatct

SEQ ID NO: 9047 - DNA, 25 bp, Homo sapiens
gaatagggctggtgcacaggttccc

SEQ ID NO: 9048 - DNA, 25 bp, Homo sapiens
tcagtgcgtggctgtacagaatagg

SEQ ID NO: 9049 - DNA, 25 bp, Homo sapiens
cctgcggtggctggagaaacattct

SEQ ID NO: 9050 - DNA, 25 bp, Homo sapiens
aacagttggctgttgctgggtgccc

SEQ ID NO: 9051 - DNA, 25 bp, Homo sapiens
tagggtggctggtgctcgtatctac

SEQ ID NO: 9052 - DNA, 25 bp, Homo sapiens
gacacacggctgttgcttgctggct

SEQ ID NO: 9053 - DNA, 25 bp, Homo sapiens
tcctgctgtggctggaaatcgagct

SEQ ID NO: 9054 - DNA, 25 bp, Homo sapiens
caacccatggctgtgtgggctgcac

SEQ ID NO: 9055 - DNA, 25 bp, Homo sapiens
caaactgaggctgtggctaagtgca

SEQ ID NO: 9056 - DNA, 25 bp, Homo sapiens
tcttggtggctgtgaacctctccat

SEQ ID NO: 9057 - DNA, 25 bp, Homo sapiens
cccagtggcgctggcgtttcgcgct

SEQ ID NO: 9058 - DNA, 25 bp, Homo sapiens
tgtcgtatagctgtggcggcttccc

SEQ ID NO: 9059 - DNA, 25 bp, Homo sapiens
agagtgctgcggctgtgccctctcc

SEQ ID NO: 9060 - DNA, 25 bp, Homo sapiens
ttaagatcagctggtcaacacggtg

SEQ ID NO: 9061 - DNA, 25 bp, Homo sapiens
ggcgctgcggctgaaattcccatag

SEQ ID NO: 9062 - DNA, 25 bp, Homo sapiens
gctgtgtgctagctgtgtgtacgct

SEQ ID NO: 9063 - DNA, 25 bp, Homo sapiens
gagcccgcagctgttgtcccggtgt

SEQ ID NO: 9064 - DNA, 25 bp, Homo sapiens
gacctgtggctgagtggttcccttt

SEQ ID NO: 9065 - DNA, 25 bp, Homo sapiens
taggaggctgctgatcaggctgttc

SEQ ID NO: 9066 - DNA, 25 bp, Homo sapiens
cagtggataggctgacatattgttc

SEQ ID NO: 9067 - DNA, 25 bp, Homo sapiens
tgtagcacacgctgaacgatggccc

SEQ ID NO: 9068 - DNA, 25 bp, Homo sapiens
gacgcacacgctgagagaggtagaa

SEQ ID NO: 9069 - DNA, 25 bp, Homo sapiens
ctgtggatggtgctggcatttaaga

SEQ ID NO: 9070 - DNA, 25 bp, Homo sapiens
ccaccaccagctgatgattctcttc

SEQ ID NO: 9071 - DNA, 25 bp, Homo sapiens
ccctggttgctgggtgcaaagtgct

SEQ ID NO: 9072 - DNA, 25 bp, Homo sapiens
caaagctggtgctgtggttgcagaa

SEQ ID NO: 9073 - DNA, 25 bp, Homo sapiens
gagtgaggtgctgggagaaccctgc

SEQ ID NO: 9074 - DNA, 25 bp, Homo sapiens
gcacgcaccgctgccgtcatacgcg

SEQ ID NO: 9075 - DNA, 25 bp, Homo sapiens
gggatctgctgctggcctcatgaac

SEQ ID NO: 9076 - DNA, 25 bp, Homo sapiens
gctgcagggtgctgtagtttaagtc

SEQ ID NO: 9077 - DNA, 25 bp, Homo sapiens
catctactgtggctgcggtgagaaa

SEQ ID NO: 9078 - DNA, 25 bp, Homo sapiens
cgaggcggtgctgcttggaatatca

SEQ ID NO: 9079 - DNA, 25 bp, Homo sapiens
cctgtgtgttgctgaataggcctca

SEQ ID NO: 9080 - DNA, 25 bp, Homo sapiens
cagttgaggctgctgggatagctca

SEQ ID NO: 9081 - DNA, 25 bp, Homo sapiens
gatgaaaatgctgccgtgctgtaag

SEQ ID NO: 9082 - DNA, 25 bp, Homo sapiens
gcactgaggctgctgtccaatgctg

SEQ ID NO: 9083 - DNA, 25 bp, Homo sapiens
tgtgcggaggctgccggtcgatgct

SEQ ID NO: 9084 - DNA, 25 bp, Homo sapiens
gatggcggtgctgccaaacatcatg

SEQ ID NO: 9085 - DNA, 25 bp, Homo sapiens
gtatgtgagcatgctgtgtatacac

SEQ ID NO: 9086 - DNA, 25 bp, Homo sapiens
ggtaccatgctgcacccacaacttg

SEQ ID NO: 9087 - DNA, 25 bp, Homo sapiens
cgctgcaagggctgctgcaggatca

SEQ ID NO: 9088 - DNA, 25 bp, Homo sapiens
tgatcggtggctgctaagctcctta

SEQ ID NO: 9089 - DNA, 25 bp, Homo sapiens
tccggaggctgctgtaatcgcgcag

SEQ ID NO: 9090 - DNA, 25 bp, Homo sapiens
tgcggttggctgctcagtggaaatc

SEQ ID NO: 9091 - DNA, 25 bp, Homo sapiens
gagttgtcgctgctgctcttgctcc

SEQ ID NO: 9092 - DNA, 25 bp, Homo sapiens
cagggcagtggctgctgcaggaacc

SEQ ID NO: 9093 - DNA, 25 bp, Homo sapiens
catgatcggtggctgctaagctcct

SEQ ID NO: 9094 - DNA, 25 bp, Homo sapiens
tagcttgcggctgcatcgatgcaat

SEQ ID NO: 9095 - DNA, 25 bp, Homo sapiens
caaggtctggcaaggtagggttcgt

SEQ ID NO: 9096 - DNA, 25 bp, Homo sapiens
ctttttaaaaagtgcgtgtgtggct

SEQ ID NO: 9097 - DNA, 25 bp, Homo sapiens
taaacaaaaacacagccagataatt

SEQ ID NO: 9098 - DNA, 25 bp, Homo sapiens
taggttaaaaacaccaacacacaca

SEQ ID NO: 9099 - DNA, 25 bp, Homo sapiens
caaagccaaaaccaccattagtctg

SEQ ID NO: 9100 - DNA, 25 bp, Homo sapiens
agccacaaaaacaaggcacaaggtg

SEQ ID NO: 9101 - DNA, 25 bp, Homo sapiens
attctgtctaaaccacacaagggag

SEQ ID NO: 9102 - DNA, 25 bp, Homo sapiens
caagttgtaaacaccaccacactca

SEQ ID NO: 9103 - DNA, 25 bp, Homo sapiens
tggttgtaaacaccacactgcactt

SEQ ID NO: 9104 - DNA, 25 bp, Homo sapiens
tattagataaacacacaccagctcc

SEQ ID NO: 9105 - DNA, 25 bp, Homo sapiens
gaaaagaaaacatcatatggccgcc

SEQ ID NO: 9106 - DNA, 25 bp, Homo sapiens
tcttatcagaaacacacttcattct

SEQ ID NO: 9107 - DNA, 25 bp, Homo sapiens
caaaagagaaacaggcacctcttca

SEQ ID NO: 9108 - DNA, 25 bp, Homo sapiens
ggatctgtaaagacgccaccacact

SEQ ID NO: 9109 - DNA, 25 bp, Homo sapiens
cacacacgctaatagcggcttaacc

SEQ ID NO: 9110 - DNA, 25 bp, Homo sapiens
tcttgatagaaagtagccattctcc

SEQ ID NO: 9111 - DNA, 25 bp, Homo sapiens
acacacacgaaagacaagtggcagc

SEQ ID NO: 9112 - DNA, 25 bp, Homo sapiens
tgtactccaaaaacacaccaggctg

SEQ ID NO: 9113 - DNA, 25 bp, Homo sapiens
ccagggccaaacacaggagcccaat

SEQ ID NO: 9114 - DNA, 25 bp, Homo sapiens
tgttaacaaacgacagccactgagg

SEQ ID NO: 9115 - DNA, 25 bp, Homo sapiens
gcagagcgagcaaacactttggtgc

SEQ ID NO: 9116 - DNA, 25 bp, Homo sapiens
cttaggcacaaacaccaaatcatgc

SEQ ID NO: 9117 - DNA, 25 bp, Homo sapiens
cacaccacacaaacagcacacacca

SEQ ID NO: 9118 - DNA, 25 bp, Homo sapiens
tcattgatgccaaacagcaccacct

SEQ ID NO: 9119 - DNA, 25 bp, Homo sapiens
attagagtcaaacacacacggccgg

SEQ ID NO: 9120 - DNA, 25 bp, Homo sapiens
ttttgccaaacacaacctctcggag

SEQ ID NO: 9121 - DNA, 25 bp, Homo sapiens
ttacctcaaactgacagaaatcatg

SEQ ID NO: 9122 - DNA, 25 bp, Homo sapiens
tgagtcattcaaacaccaggaagaa

SEQ ID NO: 9123 - DNA, 25 bp, Homo sapiens
ggatagcgcaaacaccaccgcggac

SEQ ID NO: 9124 - DNA, 25 bp, Homo sapiens
cacgccacacaaagatgttatttac

SEQ ID NO: 9125 - DNA, 25 bp, Homo sapiens
tgttgcacacaaagacaattagtga

SEQ ID NO: 9126 - DNA, 25 bp, Homo sapiens
ccaccagccaaagagactaatgcaa

SEQ ID NO: 9127 - DNA, 25 bp, Homo sapiens
gcagctcctcaaagtcagacacgaa

SEQ ID NO: 9128 - DNA, 25 bp, Homo sapiens
cgcacggcacaaagacgatggacac

SEQ ID NO: 9129 - DNA, 25 bp, Homo sapiens
caaacacagcaaaggaagttgcaac

SEQ ID NO: 9130 - DNA, 25 bp, Homo sapiens
agaagtaaaatacaaacacacccat

SEQ ID NO: 9131 - DNA, 25 bp, Homo sapiens
ttacaaaaatacacaccagcagcag

SEQ ID NO: 9132 - DNA, 25 bp, Homo sapiens
tgttacaaaatcacacccactgagc

SEQ ID NO: 9133 - DNA, 25 bp, Homo sapiens
gataggcaaaatcacacacgcaggg

SEQ ID NO: 9134 - DNA, 25 bp, Homo sapiens
gagaatgtaaatgcacacactcaca

SEQ ID NO: 9135 - DNA, 25 bp, Homo sapiens
tcgttacaaatgcaccgaacagctc

SEQ ID NO: 9136 - DNA, 25 bp, Homo sapiens
tagggcattaaaggacctccgcaga

SEQ ID NO: 9137 - DNA, 25 bp, Homo sapiens
gtccatttaaccagcacaagagccc

SEQ ID NO: 9138 - DNA, 25 bp, Homo sapiens
tgtgcatgtgtgtaaagatgagatc

SEQ ID NO: 9139 - DNA, 25 bp, Homo sapiens
tccttttaagagacagcaggaaaag

SEQ ID NO: 9140 - DNA, 25 bp, Homo sapiens
ttagttctaaacaccactacacttg

SEQ ID NO: 9141 - DNA, 25 bp, Homo sapiens
tcacacacactaaattgcattgagg

SEQ ID NO: 9142 - DNA, 25 bp, Homo sapiens
caggcaacgctaacacaggatggga

SEQ ID NO: 9143 - DNA, 25 bp, Homo sapiens
cacttcgatctaacaacaactctag

SEQ ID NO: 9144 - DNA, 25 bp, Homo sapiens
tacaaactaagacacaaccacgcac

SEQ ID NO: 9145 - DNA, 25 bp, Homo sapiens
tcagatgggtaatgtgcccacgtgg

SEQ ID NO: 9146 - DNA, 25 bp, Homo sapiens
taatgctgctgtaatctgttgcttc

SEQ ID NO: 9147 - DNA, 25 bp, Homo sapiens
tgcaacgaataagccacacacaggg

SEQ ID NO: 9148 - DNA, 25 bp, Homo sapiens
tatttaataaggcaaccacacactt

SEQ ID NO: 9149 - DNA, 25 bp, Homo sapiens
gggatgccataactgcaaagttctc

SEQ ID NO: 9150 - DNA, 25 bp, Homo sapiens
ttccaaaacccacaccaattcagag

SEQ ID NO: 9151 - DNA, 25 bp, Homo sapiens
atgacaaaaaccacaaatacctttg

SEQ ID NO: 9152 - DNA, 25 bp, Homo sapiens
tttgtaaaccaccaccacattagct

SEQ ID NO: 9153 - DNA, 25 bp, Homo sapiens
atcacgcacgaaccaacaggcaagg

SEQ ID NO: 9154 - DNA, 25 bp, Homo sapiens
gagtcgcagaaccagaagaaggcca

SEQ ID NO: 9155 - DNA, 25 bp, Homo sapiens
catcgggaaacgtgcgtgtgtgaca

SEQ ID NO: 9156 - DNA, 25 bp, Homo sapiens
tgcacacacagaaccacacaactaa

SEQ ID NO: 9157 - DNA, 25 bp, Homo sapiens
ctgccaccagcaaccaaaaagaagc

SEQ ID NO: 9158 - DNA, 25 bp, Homo sapiens
tgaagaccaacccatcaaggacaca

SEQ ID NO: 9159 - DNA, 25 bp, Homo sapiens
gattgccgcaaccaacacataggga

SEQ ID NO: 9160 - DNA, 25 bp, Homo sapiens
gaatgatgagaacgcacagaccaga

SEQ ID NO: 9161 - DNA, 25 bp, Homo sapiens
gcgaagccaaccacacactcttgaa

SEQ ID NO: 9162 - DNA, 25 bp, Homo sapiens
cattcaacgcaacctgtcacagaga

SEQ ID NO: 9163 - DNA, 25 bp, Homo sapiens
tgccacagacaaccagggcttcgtc

SEQ ID NO: 9164 - DNA, 25 bp, Homo sapiens
tgctctcaacaaccagccgcttgag

SEQ ID NO: 9165 - DNA, 25 bp, Homo sapiens
tcaatgattgcaacccacaccttct

SEQ ID NO: 9166 - DNA, 25 bp, Homo sapiens
gggaaaactagaaagcctgctggac

SEQ ID NO: 9167 - DNA, 25 bp, Homo sapiens
tcgcacgcaaactgtttcttgagtc

SEQ ID NO: 9168 - DNA, 25 bp, Homo sapiens
tctgggaaactgatgccactagcct

SEQ ID NO: 9169 - DNA, 25 bp, Homo sapiens
gagaaaaactgccaccagggccacg

SEQ ID NO: 9170 - DNA, 25 bp, Homo sapiens
cacaccatgaaacacaccagtaagg

SEQ ID NO: 9171 - DNA, 25 bp, Homo sapiens
tacagacaaacacccagtttgcctg

SEQ ID NO: 9172 - DNA, 25 bp, Homo sapiens
gggtcaaacacgcacacttgcttgg

SEQ ID NO: 9173 - DNA, 25 bp, Homo sapiens
tatacacaaacactgcgggggagaa

SEQ ID NO: 9174 - DNA, 25 bp, Homo sapiens
gtcggaaacacagcaacccatgagg

SEQ ID NO: 9175 - DNA, 25 bp, Homo sapiens
aaagacaaacacaacaaggagaggc

SEQ ID NO: 9176 - DNA, 25 bp, Homo sapiens
ggacacaaacacttcggaaggccgc

SEQ ID NO: 9177 - DNA, 25 bp, Homo sapiens
ggcacctaacaccagccaacaattt

SEQ ID NO: 9178 - DNA, 25 bp, Homo sapiens
caatgccagaaacacaggcaacact

SEQ ID NO: 9179 - DNA, 25 bp, Homo sapiens
tcagcagttgaacagttaaattcat

SEQ ID NO: 9180 - DNA, 25 bp, Homo sapiens
tctatagagaacaccacatggacca

SEQ ID NO: 9181 - DNA, 25 bp, Homo sapiens
tatgaacgaacaaacacacacgggt

SEQ ID NO: 9182 - DNA, 25 bp, Homo sapiens
gcgctcaacaacaaatcccagtcta

SEQ ID NO: 9183 - DNA, 25 bp, Homo sapiens
gcaaatggaacacaccacggaggag

SEQ ID NO: 9184 - DNA, 25 bp, Homo sapiens
catcaggtgctaacacacacacaca

SEQ ID NO: 9185 - DNA, 25 bp, Homo sapiens
agttccagaacaacacctataaagg

SEQ ID NO: 9186 - DNA, 25 bp, Homo sapiens
gatacacagaacaccaagaacacta

SEQ ID NO: 9187 - DNA, 25 bp, Homo sapiens
gaaaatgcaacaacaagggtccatc

SEQ ID NO: 9188 - DNA, 25 bp, Homo sapiens
tagagggaacacacaatgctctctt

SEQ ID NO: 9189 - DNA, 25 bp, Homo sapiens
ttctaagaacacaagcacaccggag

SEQ ID NO: 9190 - DNA, 25 bp, Homo sapiens
gatgactgcagaacaccaggagatg

SEQ ID NO: 9191 - DNA, 25 bp, Homo sapiens
tcacatatgagaacacacacagaca

SEQ ID NO: 9192 - DNA, 25 bp, Homo sapiens
gcttattgaacaggcacaccccgtt

SEQ ID NO: 9193 - DNA, 25 bp, Homo sapiens
ttcaccgcaacacagcagaaggcag

SEQ ID NO: 9194 - DNA, 25 bp, Homo sapiens
taagcaagcaacacataacaaacct

SEQ ID NO: 9195 - DNA, 25 bp, Homo sapiens
tcagaaccaacaacacaaataaagt

SEQ ID NO: 9196 - DNA, 25 bp, Homo sapiens
accacacaaacagcacacaccacat

SEQ ID NO: 9197 - DNA, 25 bp, Homo sapiens
tttgcagcacaacaccattgcccgg

SEQ ID NO: 9198 - DNA, 25 bp, Homo sapiens
acaacgacaacaacaggagcgcttg

SEQ ID NO: 9199 - DNA, 25 bp, Homo sapiens
gaacccaacaccatagcaagaatag

SEQ ID NO: 9200 - DNA, 25 bp, Homo sapiens
tagtcaagaacagaccacacaggtg

SEQ ID NO: 9201 - DNA, 25 bp, Homo sapiens
catagtgaccaacacaccggttcga

SEQ ID NO: 9202 - DNA, 25 bp, Homo sapiens
gggctgccaacaccagaaagcccag

SEQ ID NO: 9203 - DNA, 25 bp, Homo sapiens
tgtttacaacacacccaacaggaag

SEQ ID NO: 9204 - DNA, 25 bp, Homo sapiens
tagcaaagcaacaccaacagctggc

SEQ ID NO: 9205 - DNA, 25 bp, Homo sapiens
taggaccaacaccaataccaccgag

SEQ ID NO: 9206 - DNA, 25 bp, Homo sapiens
tgaggcaacaacaactcactctggg

SEQ ID NO: 9207 - DNA, 25 bp, Homo sapiens
tgacacccaacagtagccctgagct

SEQ ID NO: 9208 - DNA, 25 bp, Homo sapiens
gcggcggcaacaagagcagagaact

SEQ ID NO: 9209 - DNA, 25 bp, Homo sapiens
ggtatggcaacacacacctatggtc

SEQ ID NO: 9210 - DNA, 25 bp, Homo sapiens
aggtgcgtgtacctgattcagtccg

SEQ ID NO: 9211 - DNA, 25 bp, Homo sapiens
tagttggctaccaccacatactgct

SEQ ID NO: 9212 - DNA, 25 bp, Homo sapiens
ccaccacctactcaacaaatacttg

SEQ ID NO: 9213 - DNA, 25 bp, Homo sapiens
tccaaaatacttcctctaggtggca

SEQ ID NO: 9214 - DNA, 25 bp, Homo sapiens
gaataaatacctgcgccttgagaac

SEQ ID NO: 9215 - DNA, 25 bp, Homo sapiens
cacaccttacacacgagcgtgaaac

SEQ ID NO: 9216 - DNA, 25 bp, Homo sapiens
ggatgtttacacacactacagcatg

SEQ ID NO: 9217 - DNA, 25 bp, Homo sapiens
ggcacatcttacacatgaggtgaaa

SEQ ID NO: 9218 - DNA, 25 bp, Homo sapiens
tgctttgttacagacccaagctgtc

SEQ ID NO: 9219 - DNA, 25 bp, Homo sapiens
taacagttacacacaggaaagccag

SEQ ID NO: 9220 - DNA, 25 bp, Homo sapiens
ttttttacagcagccagttgaggtc

SEQ ID NO: 9221 - DNA, 25 bp, Homo sapiens
tgcatagacctacacacataaacgt

SEQ ID NO: 9222 - DNA, 25 bp, Homo sapiens
gtgctgggtacagcaacacatcaca

SEQ ID NO: 9223 - DNA, 25 bp, Homo sapiens
tgtgcttcatgtacacacacgcatg

SEQ ID NO: 9224 - DNA, 25 bp, Homo sapiens
tgtctacctacacacaagcacatgt

SEQ ID NO: 9225 - DNA, 25 bp, Homo sapiens
tgagtttctacacacacgagggctt

SEQ ID NO: 9226 - DNA, 25 bp, Homo sapiens
taatgaggctacagcacacagctcg

SEQ ID NO: 9227 - DNA, 25 bp, Homo sapiens
taatctcctacagcacagcaaatag

SEQ ID NO: 9228 - DNA, 25 bp, Homo sapiens
gtggcacacatacaattacagcgaa

SEQ ID NO: 9229 - DNA, 25 bp, Homo sapiens
ccaaacatatacacaccagatgctg

SEQ ID NO: 9230 - DNA, 25 bp, Homo sapiens
gctctgggatacacacacgcgcagc

SEQ ID NO: 9231 - DNA, 25 bp, Homo sapiens
attgctgggatacagacatgagccg

SEQ ID NO: 9232 - DNA, 25 bp, Homo sapiens
tcatgggagatacacactcaccttg

SEQ ID NO: 9233 - DNA, 25 bp, Homo sapiens
agacacaggcatacacatctataca

SEQ ID NO: 9234 - DNA, 25 bp, Homo sapiens
taatcacaggaaacacaactcatag

SEQ ID NO: 9235 - DNA, 25 bp, Homo sapiens
ctactcagcatggaaacaagatgaa

SEQ ID NO: 9236 - DNA, 25 bp, Homo sapiens
gtttaggaacacacacaggtagaca

SEQ ID NO: 9237 - DNA, 25 bp, Homo sapiens
agggcagggaaggagtgacacctac

SEQ ID NO: 9238 - DNA, 25 bp, Homo sapiens
aagggctggaagagcaggctttctc

SEQ ID NO: 9239 - DNA, 25 bp, Homo sapiens
tcttgaagtgaagcactacacacag

SEQ ID NO: 9240 - DNA, 25 bp, Homo sapiens
tgaccgggaagctcatgcgactgct

SEQ ID NO: 9241 - DNA, 25 bp, Homo sapiens
tggtattcgaaacacacaggaggcc

SEQ ID NO: 9242 - DNA, 25 bp, Homo sapiens
gcacacgccgaacgggaagacgcgc

SEQ ID NO: 9243 - DNA, 25 bp, Homo sapiens
cacagggccgaacttcttctgcggg

SEQ ID NO: 9244 - DNA, 25 bp, Homo sapiens
tgtacatggcgaagctagagactgt

SEQ ID NO: 9245 - DNA, 25 bp, Homo sapiens
tggctggtgcgaatggcctggcaca

SEQ ID NO: 9246 - DNA, 25 bp, Homo sapiens
ctggagctgggaataagctgcctcc

SEQ ID NO: 9247 - DNA, 25 bp, Homo sapiens
agaatttggaatcagcgcacacccc

SEQ ID NO: 9248 - DNA, 25 bp, Homo sapiens
gagccaaagacgaacgaagcaaaca

SEQ ID NO: 9249 - DNA, 25 bp, Homo sapiens
cgcacgcacaagaacctggatggag

SEQ ID NO: 9250 - DNA, 25 bp, Homo sapiens
cgaaaaagaagctggcccaccaatg

SEQ ID NO: 9251 - DNA, 25 bp, Homo sapiens
gagaggcagagaacctaaaagagaa

SEQ ID NO: 9252 - DNA, 25 bp, Homo sapiens
ttgatcacagagaacccacagatgt

SEQ ID NO: 9253 - DNA, 25 bp, Homo sapiens
gaaaaagaagctggcccaccaatga

SEQ ID NO: 9254 - DNA, 25 bp, Homo sapiens
tgtccgtgagaactccccgatgggt

SEQ ID NO: 9255 - DNA, 25 bp, Homo sapiens
tgcaggtgtgagaactcttttcatc

SEQ ID NO: 9256 - DNA, 25 bp, Homo sapiens
tccctgagagaagcgtaagacaaac

SEQ ID NO: 9257 - DNA, 25 bp, Homo sapiens
gtacttcagaacaccaacatcagat

SEQ ID NO: 9258 - DNA, 25 bp, Homo sapiens
ttcttatcagaaacacacttcattc

SEQ ID NO: 9259 - DNA, 25 bp, Homo sapiens
tttcctgagaaggtggctgctgcct

SEQ ID NO: 9260 - DNA, 25 bp, Homo sapiens
tcacacagcgcagaaacatgttttc

SEQ ID NO: 9261 - DNA, 25 bp, Homo sapiens
gagatacacagaacaccaagaacac

SEQ ID NO: 9262 - DNA, 25 bp, Homo sapiens
ttttcacagaaacaagcagcctggt

SEQ ID NO: 9263 - DNA, 25 bp, Homo sapiens
tgcagaccacagaactcaccagata

SEQ ID NO: 9264 - DNA, 25 bp, Homo sapiens
tctgctgggcagaagtctttccggg

SEQ ID NO: 9265 - DNA, 25 bp, Homo sapiens
tcttgttcagaagcacacgcacagc

SEQ ID NO: 9266 - DNA, 25 bp, Homo sapiens
ttagggagaattgatgactcagctc

SEQ ID NO: 9267 - DNA, 25 bp, Homo sapiens
gcaggtgtgtgaaagacgatccaac

SEQ ID NO: 9268 - DNA, 25 bp, Homo sapiens
cacacacaattgaaacaaaatacat

SEQ ID NO: 9269 - DNA, 25 bp, Homo sapiens
tgccccagtgaacaaccacagagag

SEQ ID NO: 9270 - DNA, 25 bp, Homo sapiens
cacacatgcacgtgaaactccagtc

SEQ ID NO: 9271 - DNA, 25 bp, Homo sapiens
ctgtccgtgtgaaggattgccagga

SEQ ID NO: 9272 - DNA, 25 bp, Homo sapiens
tcgtcaggtgaagcagtgggaatgg

SEQ ID NO: 9273 - DNA, 25 bp, Homo sapiens
ggcatgtgtgtgaagatcatccctt

SEQ ID NO: 9274 - DNA, 25 bp, Homo sapiens
accagggctgaacgcggctagttcc

SEQ ID NO: 9275 - DNA, 25 bp, Homo sapiens
ctggcagccactgaaggtatcttct

SEQ ID NO: 9276 - DNA, 25 bp, Homo sapiens
tcaagctgtgctgaagataaaacta

SEQ ID NO: 9277 - DNA, 25 bp, Homo sapiens
tccttttgaatgagcgtagcacata

SEQ ID NO: 9278 - DNA, 25 bp, Homo sapiens
tccagccacatgaaagccaaggtca

SEQ ID NO: 9279 - DNA, 25 bp, Homo sapiens
cacccaaatgaaagcataacatgca

SEQ ID NO: 9280 - DNA, 25 bp, Homo sapiens
ttcagatagcatgaaacacacacct

SEQ ID NO: 9281 - DNA, 25 bp, Homo sapiens
gattacgccaccacacttcaccttt

SEQ ID NO: 9282 - DNA, 25 bp, Homo sapiens
aagtggctggaccctgaaacctggt

SEQ ID NO: 9283 - DNA, 25 bp, Homo sapiens
tgccgacacgacactgcctatatca

SEQ ID NO: 9284 - DNA, 25 bp, Homo sapiens
cgagctctaggacccacacacagaa

SEQ ID NO: 9285 - DNA, 25 bp, Homo sapiens
gagacaatggaccacaccacagtgg

SEQ ID NO: 9286 - DNA, 25 bp, Homo sapiens
agctccgggaccacttgccagggtg

SEQ ID NO: 9287 - DNA, 25 bp, Homo sapiens
ccaccagcacgacgcaaccacccgg

SEQ ID NO: 9288 - DNA, 25 bp, Homo sapiens
ccagattgccgactgaaaataatgg

SEQ ID NO: 9289 - DNA, 25 bp, Homo sapiens
tgagggatggacgagcaagtgctgg

SEQ ID NO: 9290 - DNA, 25 bp, Homo sapiens
cggcgcgcggacgttcggtgagcac

SEQ ID NO: 9291 - DNA, 25 bp, Homo sapiens
agagagacacgacggatgcacgcac

SEQ ID NO: 9292 - DNA, 25 bp, Homo sapiens
aaacacagcgaccacaggaacatgt

SEQ ID NO: 9293 - DNA, 25 bp, Homo sapiens
cggcggcgcgactcctttgtgacag

SEQ ID NO: 9294 - DNA, 25 bp, Homo sapiens
tcagtgtcggactgctgttgtccaa

SEQ ID NO: 9295 - DNA, 25 bp, Homo sapiens
cagtaaggagaccaaccacacctat

SEQ ID NO: 9296 - DNA, 25 bp, Homo sapiens
tctttgcgcagacaccttactaatc

SEQ ID NO: 9297 - DNA, 25 bp, Homo sapiens
agaaaacagacgcagacggttttca

SEQ ID NO: 9298 - DNA, 25 bp, Homo sapiens
tcctcggcgactgggaagaatcgga

SEQ ID NO: 9299 - DNA, 25 bp, Homo sapiens
cataggataagaccacagcacaggc

SEQ ID NO: 9300 - DNA, 25 bp, Homo sapiens
tttgactcagaccaccacactgttg

SEQ ID NO: 9301 - DNA, 25 bp, Homo sapiens
gggacaagactttgccaattcaagc

SEQ ID NO: 9302 - DNA, 25 bp, Homo sapiens
catgagacaaagacgccaaccagat

SEQ ID NO: 9303 - DNA, 25 bp, Homo sapiens
cagaaacacagaccatgaagtgaaa

SEQ ID NO: 9304 - DNA, 25 bp, Homo sapiens
tgagcacgacagacgccattatagc

SEQ ID NO: 9305 - DNA, 25 bp, Homo sapiens
aagctgcggcagacccagcgggcac

SEQ ID NO: 9306 - DNA, 25 bp, Homo sapiens
aaggtggcagactcaaatgtctggc

SEQ ID NO: 9307 - DNA, 25 bp, Homo sapiens
accacaccgacagctttcggatgct

SEQ ID NO: 9308 - DNA, 25 bp, Homo sapiens
ctcggcgtgcagactaagcgcgctt

SEQ ID NO: 9309 - DNA, 25 bp, Homo sapiens
tatagttggacaccaccacgtactg

SEQ ID NO: 9310 - DNA, 25 bp, Homo sapiens
tcatataaggacactgccaccaaca

SEQ ID NO: 9311 - DNA, 25 bp, Homo sapiens
gggagctggacaggcaaattttgct

SEQ ID NO: 9312 - DNA, 25 bp, Homo sapiens
taagcctggacacaccacagtgaag

SEQ ID NO: 9313 - DNA, 25 bp, Homo sapiens
tccattgtggacagggcgtcttagg

SEQ ID NO: 9314 - DNA, 25 bp, Homo sapiens
cagctcctccgacaggtctggaatc

SEQ ID NO: 9315 - DNA, 25 bp, Homo sapiens
ggccagcatggacaccaggaccagg

SEQ ID NO: 9316 - DNA, 25 bp, Homo sapiens
caggtttgcgacagacacacatgga

SEQ ID NO: 9317 - DNA, 25 bp, Homo sapiens
gagtttagacacagacacgttagta

SEQ ID NO: 9318 - DNA, 25 bp, Homo sapiens
tcaccagaagacaaccacagtttgg

SEQ ID NO: 9319 - DNA, 25 bp, Homo sapiens
agtccggcagacaaacaccgcactg

SEQ ID NO: 9320 - DNA, 25 bp, Homo sapiens
actgcgcggcgacacacagcagcaa

SEQ ID NO: 9321 - DNA, 25 bp, Homo sapiens
gctgcgagcacgacacgcggccggg

SEQ ID NO: 9322 - DNA, 25 bp, Homo sapiens
taatgacacagacaccaatggttgg

SEQ ID NO: 9323 - DNA, 25 bp, Homo sapiens
tactcattgagacacacgtagatgc

SEQ ID NO: 9324 - DNA, 25 bp, Homo sapiens
ccaggaaagacacccgcacataggg

SEQ ID NO: 9325 - DNA, 25 bp, Homo sapiens
tgaagtaagacacacacatgggccc

SEQ ID NO: 9326 - DNA, 25 bp, Homo sapiens
tattatagagacacacacgccttga

SEQ ID NO: 9327 - DNA, 25 bp, Homo sapiens
gccatcagaagacacactggagcgc

SEQ ID NO: 9328 - DNA, 25 bp, Homo sapiens
tgaccaagagacacagacatgagcc

SEQ ID NO: 9329 - DNA, 25 bp, Homo sapiens
tccccacagacagatttggaaggaa

SEQ ID NO: 9330 - DNA, 25 bp, Homo sapiens
gtgccccagacacaacctacaaatg

SEQ ID NO: 9331 - DNA, 25 bp, Homo sapiens
cacaggtacagacaagcagagcaga

SEQ ID NO: 9332 - DNA, 25 bp, Homo sapiens
tatcatgacaagacagccacaggag

SEQ ID NO: 9333 - DNA, 25 bp, Homo sapiens
gtcaatgacagacaccaagcgggtc

SEQ ID NO: 9334 - DNA, 25 bp, Homo sapiens
gccacacgcagacagaggtcacagt

SEQ ID NO: 9335 - DNA, 25 bp, Homo sapiens
tctatcttcagacagccaaggagga

SEQ ID NO: 9336 - DNA, 25 bp, Homo sapiens
tggaacacagacagcaagcacaatt

SEQ ID NO: 9337 - DNA, 25 bp, Homo sapiens
gaattttgacctgctatgttgttag

SEQ ID NO: 9338 - DNA, 25 bp, Homo sapiens
gtcggtgtgactggcctggcacaga

SEQ ID NO: 9339 - DNA, 25 bp, Homo sapiens
taagtcatatgaccacacaccctgg

SEQ ID NO: 9340 - DNA, 25 bp, Homo sapiens
gaggtggctgactgcggatgtgcgc

SEQ ID NO: 9341 - DNA, 25 bp, Homo sapiens
gtttctctgacacacacaagatgta

SEQ ID NO: 9342 - DNA, 25 bp, Homo sapiens
taagtttgacacacagacctcagcg

SEQ ID NO: 9343 - DNA, 25 bp, Homo sapiens
ttcaaaaagggatggtgcacgctcg

SEQ ID NO: 9344 - DNA, 25 bp, Homo sapiens
tcgtgtaaaggacaacaacagcagg

SEQ ID NO: 9345 - DNA, 25 bp, Homo sapiens
tttaaaaggacacacacatgcgcat

SEQ ID NO: 9346 - DNA, 25 bp, Homo sapiens
gctgtgctggaaggttctccatgga

SEQ ID NO: 9347 - DNA, 25 bp, Homo sapiens
cacacacacaaaggcagacacgttt

SEQ ID NO: 9348 - DNA, 25 bp, Homo sapiens
tttcacgaaggccaagctatcagag

SEQ ID NO: 9349 - DNA, 25 bp, Homo sapiens
catgcacacgctcaaggtgaaggtc

SEQ ID NO: 9350 - DNA, 25 bp, Homo sapiens
gtgatgcgatcaaggcacacacaga

SEQ ID NO: 9351 - DNA, 25 bp, Homo sapiens
catttaaaagtacgcacacgcttac

SEQ ID NO: 9352 - DNA, 25 bp, Homo sapiens
tcaaataaagttgctgctgtagcaa

SEQ ID NO: 9353 - DNA, 25 bp, Homo sapiens
tagatacaaagtaccaccacagagc

SEQ ID NO: 9354 - DNA, 25 bp, Homo sapiens
gatgggaagagtaatccaccaccac

SEQ ID NO: 9355 - DNA, 25 bp, Homo sapiens
caatggactaagtggctggcgtcat

SEQ ID NO: 9356 - DNA, 25 bp, Homo sapiens
cccaatccaagtcaaactttgcaca

SEQ ID NO: 9357 - DNA, 25 bp, Homo sapiens
catagttgagaagtgcattccagaa

SEQ ID NO: 9358 - DNA, 25 bp, Homo sapiens
ggtcgaaagacaccaccatgacaat

SEQ ID NO: 9359 - DNA, 25 bp, Homo sapiens
gcacggcaaagagaaagaggaaagt

SEQ ID NO: 9360 - DNA, 25 bp, Homo sapiens
tttcaaaagacacacgcaccagtgg

SEQ ID NO: 9361 - DNA, 25 bp, Homo sapiens
gagatgcttgaagaactcaacaaaa

SEQ ID NO: 9362 - DNA, 25 bp, Homo sapiens
ttgagtcagaagaagcagcattgcc

SEQ ID NO: 9363 - DNA, 25 bp, Homo sapiens
ctcaaaggcaagacaccaagcagga

SEQ ID NO: 9364 - DNA, 25 bp, Homo sapiens
tcaaaggcaagacaccaagcaggaa

SEQ ID NO: 9365 - DNA, 25 bp, Homo sapiens
taggcaacaagagacacacgtggca

SEQ ID NO: 9366 - DNA, 25 bp, Homo sapiens
atcctgaccaagaggcacacacagc

SEQ ID NO: 9367 - DNA, 25 bp, Homo sapiens
tctcccgtaggtcccatgtggtgcg

SEQ ID NO: 9368 - DNA, 25 bp, Homo sapiens
gtaaagtaggagcagttaattcaag

SEQ ID NO: 9369 - DNA, 25 bp, Homo sapiens
agcacacgcctaggaaacgccattc

SEQ ID NO: 9370 - DNA, 25 bp, Homo sapiens
gatctgttgtaggagcagactgagt

SEQ ID NO: 9371 - DNA, 25 bp, Homo sapiens
gacggtgctaggcagtattccctca

SEQ ID NO: 9372 - DNA, 25 bp, Homo sapiens
tattgtcgatagtctccaaaaggtg

SEQ ID NO: 9373 - DNA, 25 bp, Homo sapiens
gggctgtgctagtcttctctgtacc

SEQ ID NO: 9374 - DNA, 25 bp, Homo sapiens
tctgaagcttagaagagggcctggc

SEQ ID NO: 9375 - DNA, 25 bp, Homo sapiens
tcttgcaagctagaggcacgcactg

SEQ ID NO: 9376 - DNA, 25 bp, Homo sapiens
ttaaagaagcaacctcaccacacct

SEQ ID NO: 9377 - DNA, 25 bp, Homo sapiens
cctgcttccaagcacgctacaccct

SEQ ID NO: 9378 - DNA, 25 bp, Homo sapiens
agtgtagtaagccacaccccacaga

SEQ ID NO: 9379 - DNA, 25 bp, Homo sapiens
tgttggataagccaagcacacactt

SEQ ID NO: 9380 - DNA, 25 bp, Homo sapiens
aggaacgaagcccacctctcgtctt

SEQ ID NO: 9381 - DNA, 25 bp, Homo sapiens
ctacatcaataagcacacaccagtt

SEQ ID NO: 9382 - DNA, 25 bp, Homo sapiens
catccataagaagcacgtgtgtggt

SEQ ID NO: 9383 - DNA, 25 bp, Homo sapiens
tgcttggctcaagcaccaccaatcg

SEQ ID NO: 9384 - DNA, 25 bp, Homo sapiens
aaaagtaagcagcaccacacagtgg

SEQ ID NO: 9385 - DNA, 25 bp, Homo sapiens
agttgtgtcaagcacgcacatgtag

SEQ ID NO: 9386 - DNA, 25 bp, Homo sapiens
cagctcacaatcaagcacagcaaac

SEQ ID NO: 9387 - DNA, 25 bp, Homo sapiens
tgtgtgtgtgtagccgtcaatctcc

SEQ ID NO: 9388 - DNA, 25 bp, Homo sapiens
cacggttgtagctgctgtggactcg

SEQ ID NO: 9389 - DNA, 25 bp, Homo sapiens
tggctggtgctagctctgaactctg

SEQ ID NO: 9390 - DNA, 25 bp, Homo sapiens
gacagtcttagcacagacacacgct

SEQ ID NO: 9391 - DNA, 25 bp, Homo sapiens
aagcttttagcacgctcacgtatta

SEQ ID NO: 9392 - DNA, 25 bp, Homo sapiens
gagacccatagcttcagacaaggca

SEQ ID NO: 9393 - DNA, 25 bp, Homo sapiens
ctaagaggtagcagcagcaacagcg

SEQ ID NO: 9394 - DNA, 25 bp, Homo sapiens
tgggagcggaggtactcgtatgccc

SEQ ID NO: 9395 - DNA, 25 bp, Homo sapiens
gacaggccgaggagaataaattcac

SEQ ID NO: 9396 - DNA, 25 bp, Homo sapiens
gagcaggaggaggtacatgtaatat

SEQ ID NO: 9397 - DNA, 25 bp, Homo sapiens
agcattgcagcggaggatcttgcat

SEQ ID NO: 9398 - DNA, 25 bp, Homo sapiens
gtcagcgaggaggagcgacggttac

SEQ ID NO: 9399 - DNA, 25 bp, Homo sapiens
tttggctggaggtgccctgtgtgcc

SEQ ID NO: 9400 - DNA, 25 bp, Homo sapiens
aaggtgtggaggagctcttcctgca

SEQ ID NO: 9401 - DNA, 25 bp, Homo sapiens
ttgatgatatcgaggcaggagcacc

SEQ ID NO: 9402 - DNA, 25 bp, Homo sapiens
ccggcggcgagtcggtccgagggcc

SEQ ID NO: 9403 - DNA, 25 bp, Homo sapiens
cttggcagaggagtaattcaatccc

SEQ ID NO: 9404 - DNA, 25 bp, Homo sapiens
tatggagctggagtctataagccac

SEQ ID NO: 9405 - DNA, 25 bp, Homo sapiens
tgcacctgaggagtagcagcactgc

SEQ ID NO: 9406 - DNA, 25 bp, Homo sapiens
cctcgtgggagtggtgtccgggcct

SEQ ID NO: 9407 - DNA, 25 bp, Homo sapiens
gtggaaggagtggagtatttctcca

SEQ ID NO: 9408 - DNA, 25 bp, Homo sapiens
gaaggcggagtggagtaacaacctc

SEQ ID NO: 9409 - DNA, 25 bp, Homo sapiens
ggttccgagtgctctgcggactcca

SEQ ID NO: 9410 - DNA, 25 bp, Homo sapiens
tccttggagagttacagcacacagt

SEQ ID NO: 9411 - DNA, 25 bp, Homo sapiens
ccagggtgcagaggaagatgacagc

SEQ ID NO: 9412 - DNA, 25 bp, Homo sapiens
caggagactagagtacagagagcat

SEQ ID NO: 9413 - DNA, 25 bp, Homo sapiens
gaaggacagagtatgctgtaaccac

SEQ ID NO: 9414 - DNA, 25 bp, Homo sapiens
tcacggcggagaaagagctagtcac

SEQ ID NO: 9415 - DNA, 25 bp, Homo sapiens
taaaaggagactccacaccacaggt

SEQ ID NO: 9416 - DNA, 25 bp, Homo sapiens
gaacacggagagataaacacacgcc

SEQ ID NO: 9417 - DNA, 25 bp, Homo sapiens
tagagtgaggagagccctgttcagc

SEQ ID NO: 9418 - DNA, 25 bp, Homo sapiens
gaatggacgagacaccaccatcagt

SEQ ID NO: 9419 - DNA, 25 bp, Homo sapiens
gtattatagagacacacacgccttg

SEQ ID NO: 9420 - DNA, 25 bp, Homo sapiens
ggtggagagagatacaccacactgc

SEQ ID NO: 9421 - DNA, 25 bp, Homo sapiens
gattgtggctgaggcgccacgcttc

SEQ ID NO: 9422 - DNA, 25 bp, Homo sapiens
tgaagcagtgtgagtggaaaagtaa

SEQ ID NO: 9423 - DNA, 25 bp, Homo sapiens
tgtgagtgtgtgagtaggagagagg

SEQ ID NO: 9424 - DNA, 25 bp, Homo sapiens
cacacacacttgagttgcctgggtg

SEQ ID NO: 9425 - DNA, 25 bp, Homo sapiens
tgcagcagttgctgaggcgccagct

SEQ ID NO: 9426 - DNA, 25 bp, Homo sapiens
acacacacgctgaggctcctgggaa

SEQ ID NO: 9427 - DNA, 25 bp, Homo sapiens
ggtggcagtgagtgctcctgctcca

SEQ ID NO: 9428 - DNA, 25 bp, Homo sapiens
cagaggcggcatgagtacagtagcc

SEQ ID NO: 9429 - DNA, 25 bp, Homo sapiens
gacatagttgagaagtgcattccag

SEQ ID NO: 9430 - DNA, 25 bp, Homo sapiens
cacagtgacagtgagaaactgcgct

SEQ ID NO: 9431 - DNA, 25 bp, Homo sapiens
tggcagaggtgagagtccaacccag

SEQ ID NO: 9432 - DNA, 25 bp, Homo sapiens
gaggcaggtgagaatcccatcttca

SEQ ID NO: 9433 - DNA, 25 bp, Homo sapiens
tcaatacagatgagaacacacacca

SEQ ID NO: 9434 - DNA, 25 bp, Homo sapiens
caggctgtggtgagattaggaaatc

SEQ ID NO: 9435 - DNA, 25 bp, Homo sapiens
agcggagacgagcacgctcacgcac

SEQ ID NO: 9436 - DNA, 25 bp, Homo sapiens
taaagtggagctggtgtgagaataa

SEQ ID NO: 9437 - DNA, 25 bp, Homo sapiens
gtgggcaggagcataattctatggt

SEQ ID NO: 9438 - DNA, 25 bp, Homo sapiens
ccagggagtgagcacggtaccaatt

SEQ ID NO: 9439 - DNA, 25 bp, Homo sapiens
cagtggagcggagcaatcatgactc

SEQ ID NO: 9440 - DNA, 25 bp, Homo sapiens
cagcggagacgagcacgctcacgca

SEQ ID NO: 9441 - DNA, 25 bp, Homo sapiens
caagagttggagcagttaacaccac

SEQ ID NO: 9442 - DNA, 25 bp, Homo sapiens
gagaaagtgagcgtgtgcgctgcag

SEQ ID NO: 9443 - DNA, 25 bp, Homo sapiens
caggcctgtggagcagcacacacca

SEQ ID NO: 9444 - DNA, 25 bp, Homo sapiens
taactttgagcatgttacccagccc

SEQ ID NO: 9445 - DNA, 25 bp, Homo sapiens
gacagatgtgtgagcagaagttctc

SEQ ID NO: 9446 - DNA, 25 bp, Homo sapiens
ttttttgagccttccagcgccagtt

SEQ ID NO: 9447 - DNA, 25 bp, Homo sapiens
tggtagttgagcacacacatcacaa

SEQ ID NO: 9448 - DNA, 25 bp, Homo sapiens
catgcacatgcgtgtgagcgccgag

SEQ ID NO: 9449 - DNA, 25 bp, Homo sapiens
catgcacaggtgtgagcatgcatac

SEQ ID NO: 9450 - DNA, 25 bp, Homo sapiens
ctgtgtgcgtgtgagcaagcctcga

SEQ ID NO: 9451 - DNA, 25 bp, Homo sapiens
tctgccacaccaaacaacgggattg

SEQ ID NO: 9452 - DNA, 25 bp, Homo sapiens
atggcctcccaacaaaacacagaca

SEQ ID NO: 9453 - DNA, 25 bp, Homo sapiens
gtactagccaaaccaaccctgctta

SEQ ID NO: 9454 - DNA, 25 bp, Homo sapiens
attctccaccaaccagctttatctt

SEQ ID NO: 9455 - DNA, 25 bp, Homo sapiens
gctgaatcccaacaacacttcgcaa

SEQ ID NO: 9456 - DNA, 25 bp, Homo sapiens
tggttctccaaataacaactgtgtg

SEQ ID NO: 9457 - DNA, 25 bp, Homo sapiens
cggttcccaaccagcctagatgaga

SEQ ID NO: 9458 - DNA, 25 bp, Homo sapiens
agcatgaggtccaaccttgaactcc

SEQ ID NO: 9459 - DNA, 25 bp, Homo sapiens
cgggacccaacacactaagggcact

SEQ ID NO: 9460 - DNA, 25 bp, Homo sapiens
ctgtgaatcccaaccagcagcgtca

SEQ ID NO: 9461 - DNA, 25 bp, Homo sapiens
gaatagtccaaccacacacaggtgg

SEQ ID NO: 9462 - DNA, 25 bp, Homo sapiens
ttctccaccaaccagctttatcttg

SEQ ID NO: 9463 - DNA, 25 bp, Homo sapiens
tatgttgtccaaccacagacaggac

SEQ ID NO: 9464 - DNA, 25 bp, Homo sapiens
gtgagtggccaacccaccaggaatc

SEQ ID NO: 9465 - DNA, 25 bp, Homo sapiens
taaagatgccaacagaaagagacac

SEQ ID NO: 9466 - DNA, 25 bp, Homo sapiens
tcaattagccaaaaacgagacgcca

SEQ ID NO: 9467 - DNA, 25 bp, Homo sapiens
tcaggaagccaacacacacagctgg

SEQ ID NO: 9468 - DNA, 25 bp, Homo sapiens
cataaaaccaagacaagcaacagaa

SEQ ID NO: 9469 - DNA, 25 bp, Homo sapiens
tagatagcagccaacaagctcaggg

SEQ ID NO: 9470 - DNA, 25 bp, Homo sapiens
gaaacaccaagggtcgctgcacata

SEQ ID NO: 9471 - DNA, 25 bp, Homo sapiens
tgtagccaccaagcctcttcctgtg

SEQ ID NO: 9472 - DNA, 25 bp, Homo sapiens
tgcacccagccaagtgtattatatt

SEQ ID NO: 9473 - DNA, 25 bp, Homo sapiens
cctggatcaccaagccacaagtttg

SEQ ID NO: 9474 - DNA, 25 bp, Homo sapiens
tcattcttacaaaccacaaaaggat

SEQ ID NO: 9475 - DNA, 25 bp, Homo sapiens
cacttaggcacaaacaccaaatcat

SEQ ID NO: 9476 - DNA, 25 bp, Homo sapiens
ctgcacccagccaagtgtattatat

SEQ ID NO: 9477 - DNA, 25 bp, Homo sapiens
accaccaccaatgacgatgctacag

SEQ ID NO: 9478 - DNA, 25 bp, Homo sapiens
ggataagccaagcacacacttttca

SEQ ID NO: 9479 - DNA, 25 bp, Homo sapiens
gctgccacacacaacgttcctctgg

SEQ ID NO: 9480 - DNA, 25 bp, Homo sapiens
tgtgacacacacaacaccggatagc

SEQ ID NO: 9481 - DNA, 25 bp, Homo sapiens
aatccgaacaacagctgaactagtc

SEQ ID NO: 9482 - DNA, 25 bp, Homo sapiens
tattagcaacaacaaaactcaagag

SEQ ID NO: 9483 - DNA, 25 bp, Homo sapiens
atttcacaacaaacagaccaaaggg

SEQ ID NO: 9484 - DNA, 25 bp, Homo sapiens
actgcgctcaacaacaaatcccagt

SEQ ID NO: 9485 - DNA, 25 bp, Homo sapiens
cagcaacaaacaaactcaggaggat

SEQ ID NO: 9486 - DNA, 25 bp, Homo sapiens
cctttgcaacaaccaacctaatgta

SEQ ID NO: 9487 - DNA, 25 bp, Homo sapiens
gtgctctcaacaaccagccgcttga

SEQ ID NO: 9488 - DNA, 25 bp, Homo sapiens
tgagcacagcaacaaaacaatagta

SEQ ID NO: 9489 - DNA, 25 bp, Homo sapiens
aacatcataacaagctcacacatgc

SEQ ID NO: 9490 - DNA, 25 bp, Homo sapiens
agacgatagacaagaacacaaatgc

SEQ ID NO: 9491 - DNA, 25 bp, Homo sapiens
ttttaacaaggccacaccacaggga

SEQ ID NO: 9492 - DNA, 25 bp, Homo sapiens
cacagaagccacaaccgaaggcaag

SEQ ID NO: 9493 - DNA, 25 bp, Homo sapiens
tacgccgcacaaaagaccattagga

SEQ ID NO: 9494 - DNA, 25 bp, Homo sapiens
ttagcaaacaagcacatgtcacggg

SEQ ID NO: 9495 - DNA, 25 bp, Homo sapiens
caggcactcacacaaaagggctaca

SEQ ID NO: 9496 - DNA, 25 bp, Homo sapiens
tccataccacaaacatcagcacaag

SEQ ID NO: 9497 - DNA, 25 bp, Homo sapiens
catcactaccacaaagggaagaagg

SEQ ID NO: 9498 - DNA, 25 bp, Homo sapiens
tcctggctcacaacacacattgttt

SEQ ID NO: 9499 - DNA, 25 bp, Homo sapiens
cagtggcgcacacaaatctttaagg

SEQ ID NO: 9500 - DNA, 25 bp, Homo sapiens
gttttcacaaaaccaccaccatcat

SEQ ID NO: 9501 - DNA, 25 bp, Homo sapiens
catggatccacacaaagccaaggaa

SEQ ID NO: 9502 - DNA, 25 bp, Homo sapiens
caggtgcacacacaacctggctggg

SEQ ID NO: 9503 - DNA, 25 bp, Homo sapiens
tgtgtctgacacaacccacttctta

SEQ ID NO: 9504 - DNA, 25 bp, Homo sapiens
tgggcacacacaaagctggcaggtg

SEQ ID NO: 9505 - DNA, 25 bp, Homo sapiens
gcgaccacacaagcaagcaggaggt

SEQ ID NO: 9506 - DNA, 25 bp, Homo sapiens
tgccagcccacaagagtaatagccc

SEQ ID NO: 9507 - DNA, 25 bp, Homo sapiens
ggctggttcaaccacaggccatggg

SEQ ID NO: 9508 - DNA, 25 bp, Homo sapiens
caaactttcaaagcgagagcccctt

SEQ ID NO: 9509 - DNA, 25 bp, Homo sapiens
tatctaggtcaagaaaaacgggcag

SEQ ID NO: 9510 - DNA, 25 bp, Homo sapiens
ccttctgatgtcaagatgtgttcag

SEQ ID NO: 9511 - DNA, 25 bp, Homo sapiens
ttggtgcactcaaaaacacgcacgg

SEQ ID NO: 9512 - DNA, 25 bp, Homo sapiens
gtaatatctcaagcacaagcacagc

SEQ ID NO: 9513 - DNA, 25 bp, Homo sapiens
ccacaaccacacctagggatgcttt

SEQ ID NO: 9514 - DNA, 25 bp, Homo sapiens
attccaccatcaagtgtggctctcc

SEQ ID NO: 9515 - DNA, 25 bp, Homo sapiens
gccgctgtcacacgcacagtgggtc

SEQ ID NO: 9516 - DNA, 25 bp, Homo sapiens
gggacaccacccaattcacgtatgg

SEQ ID NO: 9517 - DNA, 25 bp, Homo sapiens
accgggccaccacatcagtctaatg

SEQ ID NO: 9518 - DNA, 25 bp, Homo sapiens
cattcacacatccacccaggtagga

SEQ ID NO: 9519 - DNA, 25 bp, Homo sapiens
cacagcacaagccaccaccgaaagt

SEQ ID NO: 9520 - DNA, 25 bp, Homo sapiens
ttgttaccaccaccaggccatctgt

SEQ ID NO: 9521 - DNA, 25 bp, Homo sapiens
ggaggctgccaccactgcttgggat

SEQ ID NO: 9522 - DNA, 25 bp, Homo sapiens
ggcaatacacaccaaccaatgaaag

SEQ ID NO: 9523 - DNA, 25 bp, Homo sapiens
tgtaccccaccaaacagagaagcgg

SEQ ID NO: 9524 - DNA, 25 bp, Homo sapiens
taaacaccaccgcatcactgcattg

SEQ ID NO: 9525 - DNA, 25 bp, Homo sapiens
ggttcagccaccacatgtacacgta

SEQ ID NO: 9526 - DNA, 25 bp, Homo sapiens
ccaggacccaccctatgtgatagga

SEQ ID NO: 9527 - DNA, 25 bp, Homo sapiens
tgaaccaccaccgagagcaatttgt

SEQ ID NO: 9528 - DNA, 25 bp, Homo sapiens
aaacgatccaccacctagtccatat

SEQ ID NO: 9529 - DNA, 25 bp, Homo sapiens
tgaccaaccacccagctttgggaag

SEQ ID NO: 9530 - DNA, 25 bp, Homo sapiens
gtaaaccaccaccacattagcttag

SEQ ID NO: 9531 - DNA, 25 bp, Homo sapiens
gacaagtccacgaccactttttgcg

SEQ ID NO: 9532 - DNA, 25 bp, Homo sapiens
tgtgggatccaccagcacccaacag

SEQ ID NO: 9533 - DNA, 25 bp, Homo sapiens
gtactccacacgcacgatgcgcgag

SEQ ID NO: 9534 - DNA, 25 bp, Homo sapiens
aacacagctgccacggcttgcgggt

SEQ ID NO: 9535 - DNA, 25 bp, Homo sapiens
accgaggccacgaacacgatgaagt

SEQ ID NO: 9536 - DNA, 25 bp, Homo sapiens
tgatctacagccacccagataagag

SEQ ID NO: 9537 - DNA, 25 bp, Homo sapiens
gctcaacgccaccacaaagagacgt

SEQ ID NO: 9538 - DNA, 25 bp, Homo sapiens
tcacaagcaccacgatgccttaaaa

SEQ ID NO: 9539 - DNA, 25 bp, Homo sapiens
cttgcaagcaccacgaacaagctga

SEQ ID NO: 9540 - DNA, 25 bp, Homo sapiens
ggagccccacgcacgtctgtaactt

SEQ ID NO: 9541 - DNA, 25 bp, Homo sapiens
gggcacaccacgtgctcacaggact

SEQ ID NO: 9542 - DNA, 25 bp, Homo sapiens
aatagcactcacacctaggttccaa

SEQ ID NO: 9543 - DNA, 25 bp, Homo sapiens
aaggccaccacgttgctatgccgga

SEQ ID NO: 9544 - DNA, 25 bp, Homo sapiens
ggaccaccacgaacagccgtgtggg

SEQ ID NO: 9545 - DNA, 25 bp, Homo sapiens
taagccaccacgctgaaagaagctc

SEQ ID NO: 9546 - DNA, 25 bp, Homo sapiens
cagccgctgtcacacgcacagtggg

SEQ ID NO: 9547 - DNA, 25 bp, Homo sapiens
gggattccactgtcacaaaacataa

SEQ ID NO: 9548 - DNA, 25 bp, Homo sapiens
gtatgactcacacgacaccagtagt

SEQ ID NO: 9549 - DNA, 25 bp, Homo sapiens
agttcattccactgcacgcactgag

SEQ ID NO: 9550 - DNA, 25 bp, Homo sapiens
cgggccaagcacacgccgaacggga

SEQ ID NO: 9551 - DNA, 25 bp, Homo sapiens
gaacagaacacccaccttagctctt

SEQ ID NO: 9552 - DNA, 25 bp, Homo sapiens
tgaatcccacacccacagtactatt

SEQ ID NO: 9553 - DNA, 25 bp, Homo sapiens
cgtagacgcacaccggcgtcggagc

SEQ ID NO: 9554 - DNA, 25 bp, Homo sapiens
gcgcagcctacacgcaccagtttct

SEQ ID NO: 9555 - DNA, 25 bp, Homo sapiens
ccacctcacacacggatcagttgtg

SEQ ID NO: 9556 - DNA, 25 bp, Homo sapiens
gggtcacacaccaaagtggaggctc

SEQ ID NO: 9557 - DNA, 25 bp, Homo sapiens
gtgtaaacaccaccgcactatgatt

SEQ ID NO: 9558 - DNA, 25 bp, Homo sapiens
ttgtaaacaccaccgcactcagagc

SEQ ID NO: 9559 - DNA, 25 bp, Homo sapiens
ttgtaaacacccctgcactcagatc

SEQ ID NO: 9560 - DNA, 25 bp, Homo sapiens
cgccgcggcacacgcgcacctacgt

SEQ ID NO: 9561 - DNA, 25 bp, Homo sapiens
cagcacccaacacgcagtaatgaga

SEQ ID NO: 9562 - DNA, 25 bp, Homo sapiens
gcatgggcaacaccacactgcttgt

SEQ ID NO: 9563 - DNA, 25 bp, Homo sapiens
ccgccacagacacgagggaggtcct

SEQ ID NO: 9564 - DNA, 25 bp, Homo sapiens
gagggacacacccagctctgtaagg

SEQ ID NO: 9565 - DNA, 25 bp, Homo sapiens
tcagaggcaacaccacgggcaggga

SEQ ID NO: 9566 - DNA, 25 bp, Homo sapiens
ccaacaaacaccaggcgatgagcag

SEQ ID NO: 9567 - DNA, 25 bp, Homo sapiens
agcaaagcaacaccaacagctggct

SEQ ID NO: 9568 - DNA, 25 bp, Homo sapiens
gaagacaacacggacaacctctcct

SEQ ID NO: 9569 - DNA, 25 bp, Homo sapiens
tgggaggcacaccttacacacgagc

SEQ ID NO: 9570 - DNA, 25 bp, Homo sapiens
aagcatcgccacacccacaatggtt

SEQ ID NO: 9571 - DNA, 25 bp, Homo sapiens
caaatatgcacacacggagggcgtt

SEQ ID NO: 9572 - DNA, 25 bp, Homo sapiens
tgtcaggccacactcagaccgatta

SEQ ID NO: 9573 - DNA, 25 bp, Homo sapiens
ggcacatctcacacctaagcataaa

SEQ ID NO: 9574 - DNA, 25 bp, Homo sapiens
tgtcaccacacactgtaaaataccg

SEQ ID NO: 9575 - DNA, 25 bp, Homo sapiens
aaccaaacacgcaggttcagtaggg

SEQ ID NO: 9576 - DNA, 25 bp, Homo sapiens
tgtagcaccacacccataataacca

SEQ ID NO: 9577 - DNA, 25 bp, Homo sapiens
gaggaacacaccatcactccgaggt

SEQ ID NO: 9578 - DNA, 25 bp, Homo sapiens
ggaacacacaccaatgaggagccca

SEQ ID NO: 9579 - DNA, 25 bp, Homo sapiens
catgttgtcacacaccacacggaag

SEQ ID NO: 9580 - DNA, 25 bp, Homo sapiens
gggcaccacaccacgctcgcttggc

SEQ ID NO: 9581 - DNA, 25 bp, Homo sapiens
tatatacacacacgccaatcaaggg

SEQ ID NO: 9582 - DNA, 25 bp, Homo sapiens
cccattcacacacgatctcacccat

SEQ ID NO: 9583 - DNA, 25 bp, Homo sapiens
gggcaacacaccacaggatagtggg

SEQ ID NO: 9584 - DNA, 25 bp, Homo sapiens
tctcctcacacaccagacagctcac

SEQ ID NO: 9585 - DNA, 25 bp, Homo sapiens
tgtatcagcacacaccaacttcagc

SEQ ID NO: 9586 - DNA, 25 bp, Homo sapiens
accacagaacactcatccaccacag

SEQ ID NO: 9587 - DNA, 25 bp, Homo sapiens
tcttaaagcaccacatcaaccttaa

SEQ ID NO: 9588 - DNA, 25 bp, Homo sapiens
cgtggatccacacgcacagtgggct

SEQ ID NO: 9589 - DNA, 25 bp, Homo sapiens
tgcacaaagcacactgcgtagatcc

SEQ ID NO: 9590 - DNA, 25 bp, Homo sapiens
tataaggacactgccaccaacaaat

SEQ ID NO: 9591 - DNA, 25 bp, Homo sapiens
aaacaccacactgcacttgaaccag

SEQ ID NO: 9592 - DNA, 25 bp, Homo sapiens
gggctggacacacacagcttcctgc

SEQ ID NO: 9593 - DNA, 25 bp, Homo sapiens
ggagatacacactcaccttgattgg

SEQ ID NO: 9594 - DNA, 25 bp, Homo sapiens
ttcacagcccacaagtcctttttga

SEQ ID NO: 9595 - DNA, 25 bp, Homo sapiens
tacgccaccacacttcacctttatc

SEQ ID NO: 9596 - DNA, 25 bp, Homo sapiens
tacacaggcacacttgcacgacgag

SEQ ID NO: 9597 - DNA, 25 bp, Homo sapiens
tgccacaaccacacctagggatgct

SEQ ID NO: 9598 - DNA, 25 bp, Homo sapiens
ttatgcgagccacactgccggtttg

SEQ ID NO: 9599 - DNA, 25 bp, Homo sapiens
tgtgtacacacactactgagatcca

SEQ ID NO: 9600 - DNA, 25 bp, Homo sapiens
ccattgcacacacacatttttatag

SEQ ID NO: 9601 - DNA, 25 bp, Homo sapiens
aggaacaacacacttcagttgggct

SEQ ID NO: 9602 - DNA, 25 bp, Homo sapiens
caggagacacacactttcgggaggc

SEQ ID NO: 9603 - DNA, 25 bp, Homo sapiens
tcttttccacacaccaatgacttct

SEQ ID NO: 9604 - DNA, 25 bp, Homo sapiens
ggctcaacacactcatagctgtctt

SEQ ID NO: 9605 - DNA, 25 bp, Homo sapiens
aaacgccacactattcatggtctgg

SEQ ID NO: 9606 - DNA, 25 bp, Homo sapiens
tcagccgcacacactggctctgtgg

SEQ ID NO: 9607 - DNA, 25 bp, Homo sapiens
tgcacatcagacacactcaagggag

SEQ ID NO: 9608 - DNA, 25 bp, Homo sapiens
taaccaccacatcgtctttttgcaa

SEQ ID NO: 9609 - DNA, 25 bp, Homo sapiens
ggcatagctcacacattattgcatt

SEQ ID NO: 9610 - DNA, 25 bp, Homo sapiens
tggcagcacatcacactgcagagta

SEQ ID NO: 9611 - DNA, 25 bp, Homo sapiens
gcggtcaccacacaccaggaagtca

SEQ ID NO: 9612 - DNA, 25 bp, Homo sapiens
gaaacaccacacagaaccaaaacga

SEQ ID NO: 9613 - DNA, 25 bp, Homo sapiens
gatgaacaccacactgacaacctgg

SEQ ID NO: 9614 - DNA, 25 bp, Homo sapiens
atgtatacccacacagaccattatg

SEQ ID NO: 9615 - DNA, 25 bp, Homo sapiens
taacacccacagtacctatcttcat

SEQ ID NO: 9616 - DNA, 25 bp, Homo sapiens
gtcccaccacacgaaagagtagctt

SEQ ID NO: 9617 - DNA, 25 bp, Homo sapiens
cgtaccaccacacgtaagtgagggt

SEQ ID NO: 9618 - DNA, 25 bp, Homo sapiens
taccacccacaaaacatagcaaaca

SEQ ID NO: 9619 - DNA, 25 bp, Homo sapiens
tagaccccacacacattatcaagta

SEQ ID NO: 9620 - DNA, 25 bp, Homo sapiens
tgaagactccacaccactcatacag

SEQ ID NO: 9621 - DNA, 25 bp, Homo sapiens
gattaaccacaaacacgatcaggtc

SEQ ID NO: 9622 - DNA, 25 bp, Homo sapiens
ttcatgggccacacacttaagcgta

SEQ ID NO: 9623 - DNA, 25 bp, Homo sapiens
acggacccacagacacgagcttgtg

SEQ ID NO: 9624 - DNA, 25 bp, Homo sapiens
atggcacatcccacacttgaatgtg

SEQ ID NO: 9625 - DNA, 25 bp, Homo sapiens
ccaggctggccacagtggtcagtgt

SEQ ID NO: 9626 - DNA, 25 bp, Homo sapiens
tatactcccacacgcaatgtatggg

SEQ ID NO: 9627 - DNA, 25 bp, Homo sapiens
gcatccagctccacacgatcagaga

SEQ ID NO: 9628 - DNA, 25 bp, Homo sapiens
gatgaacaccacacaagatctgaag

SEQ ID NO: 9629 - DNA, 25 bp, Homo sapiens
tctcgaaccacaggcaccgtgagtt

SEQ ID NO: 9630 - DNA, 25 bp, Homo sapiens
ttgaagcccacacagagctgggtga

SEQ ID NO: 9631 - DNA, 25 bp, Homo sapiens
agatagtctccacacaacacactgg

SEQ ID NO: 9632 - DNA, 25 bp, Homo sapiens
tattgcacccacatcattgcctcag

SEQ ID NO: 9633 - DNA, 25 bp, Homo sapiens
tggagacagccacacgaaatcagga

SEQ ID NO: 9634 - DNA, 25 bp, Homo sapiens
gcacacagagccacaacaggagttg

SEQ ID NO: 9635 - DNA, 25 bp, Homo sapiens
ctgctagccagccacacaggaagca

SEQ ID NO: 9636 - DNA, 25 bp, Homo sapiens
gccattcaacacaggccacccattt

SEQ ID NO: 9637 - DNA, 25 bp, Homo sapiens
ctgggaaccacagcaacaagacgat

SEQ ID NO: 9638 - DNA, 25 bp, Homo sapiens
ttggtcgcacacaccttgacagcac

SEQ ID NO: 9639 - DNA, 25 bp, Homo sapiens
gaatatgccacacaccagggaaagt

SEQ ID NO: 9640 - DNA, 25 bp, Homo sapiens
gttatcgcacacacatcagttccag

SEQ ID NO: 9641 - DNA, 25 bp, Homo sapiens
cttctggaacacacaaccgcaagtg

SEQ ID NO: 9642 - DNA, 25 bp, Homo sapiens
taatgtgcccacatcatatcataaa

SEQ ID NO: 9643 - DNA, 25 bp, Homo sapiens
tgaagacgacacacgtgaccaaggg

SEQ ID NO: 9644 - DNA, 25 bp, Homo sapiens
ttaggctgccacagcacagagtccc

SEQ ID NO: 9645 - DNA, 25 bp, Homo sapiens
taagaaacacaccaactcggaccag

SEQ ID NO: 9646 - DNA, 25 bp, Homo sapiens
caaggcaatacacaccaaccaatga

SEQ ID NO: 9647 - DNA, 25 bp, Homo sapiens
aattctggacacactaccacgtggc

SEQ ID NO: 9648 - DNA, 25 bp, Homo sapiens
tgaacaaacacacacatttataact

SEQ ID NO: 9649 - DNA, 25 bp, Homo sapiens
gagcacgaacacagttctctctacc

SEQ ID NO: 9650 - DNA, 25 bp, Homo sapiens
tgctcgaggacacacaataggctgt

SEQ ID NO: 9651 - DNA, 25 bp, Homo sapiens
tgcattttcacacaccttttgggag

SEQ ID NO: 9652 - DNA, 25 bp, Homo sapiens
gagaagaacacatcactcctagggt

SEQ ID NO: 9653 - DNA, 25 bp, Homo sapiens
ggaacagacacaacccatacaacca

SEQ ID NO: 9654 - DNA, 25 bp, Homo sapiens
cgggcacagcacacaacgagtcact

SEQ ID NO: 9655 - DNA, 25 bp, Homo sapiens
agaaaacacacagcctcacctgtac

SEQ ID NO: 9656 - DNA, 25 bp, Homo sapiens
tgagtaggcacacacagccgttggg

SEQ ID NO: 9657 - DNA, 25 bp, Homo sapiens
caagccaaacacaatctcagcagga

SEQ ID NO: 9658 - DNA, 25 bp, Homo sapiens
cgtatatcatgacacaaacaccaga

SEQ ID NO: 9659 - DNA, 25 bp, Homo sapiens
aacccagcacacatcacatacacaa

SEQ ID NO: 9660 - DNA, 25 bp, Homo sapiens
gcccctacacacagagaagacgaat

SEQ ID NO: 9661 - DNA, 25 bp, Homo sapiens
ttgacatcacacacaaaggaatgac

SEQ ID NO: 9662 - DNA, 25 bp, Homo sapiens
gctgcataacacacactatccacgt

SEQ ID NO: 9663 - DNA, 25 bp, Homo sapiens
agtgtggccacacaccagagccctt

SEQ ID NO: 9664 - DNA, 25 bp, Homo sapiens
caagtttacacacaggcatagcagc

SEQ ID NO: 9665 - DNA, 25 bp, Homo sapiens
catattccatacacacacattccat

SEQ ID NO: 9666 - DNA, 25 bp, Homo sapiens
gataaagacacacggagcaaagaac

SEQ ID NO: 9667 - DNA, 25 bp, Homo sapiens
tggagaacacacacccctgactttt

SEQ ID NO: 9668 - DNA, 25 bp, Homo sapiens
gcacagcataacacacatcgagaaa

SEQ ID NO: 9669 - DNA, 25 bp, Homo sapiens
taggaacacacacaggtagacaggt

SEQ ID NO: 9670 - DNA, 25 bp, Homo sapiens
ttcttgtgcacacagaccatttgcc

SEQ ID NO: 9671 - DNA, 25 bp, Homo sapiens
tcttcccacacagccctattttatg

SEQ ID NO: 9672 - DNA, 25 bp, Homo sapiens
gcagatatgtacacactcacacatg

SEQ ID NO: 9673 - DNA, 25 bp, Homo sapiens
taatgtacacacacccagaaagaga

SEQ ID NO: 9674 - DNA, 25 bp, Homo sapiens
ccaagtcagacacaccagcatgaaa

SEQ ID NO: 9675 - DNA, 25 bp, Homo sapiens
tgagcacccacacagctacagatat

SEQ ID NO: 9676 - DNA, 25 bp, Homo sapiens
tagtctccacacaacacactggagg

SEQ ID NO: 9677 - DNA, 25 bp, Homo sapiens
gagcaaccacacatacgcaaactga

SEQ ID NO: 9678 - DNA, 25 bp, Homo sapiens
tggtccagacacactagctacaaat

SEQ ID NO: 9679 - DNA, 25 bp, Homo sapiens
gacgtcaacacagcatcacttggtg

SEQ ID NO: 9680 - DNA, 25 bp, Homo sapiens
gagccacgcacacaatgcgcgtgca

SEQ ID NO: 9681 - DNA, 25 bp, Homo sapiens
ttagtgagacacaccacgagcaggc

SEQ ID NO: 9682 - DNA, 25 bp, Homo sapiens
gatacttcacacacatgcctcaggt

SEQ ID NO: 9683 - DNA, 25 bp, Homo sapiens
tgaaagtcacacatgctaacccggc

SEQ ID NO: 9684 - DNA, 25 bp, Homo sapiens
tcttgccgcacacactgtcttcagg

SEQ ID NO: 9685 - DNA, 25 bp, Homo sapiens
cagccacaccacacaggagatggag

SEQ ID NO: 9686 - DNA, 25 bp, Homo sapiens
catacacaccacacagtgcacatgt

SEQ ID NO: 9687 - DNA, 25 bp, Homo sapiens
tatgagcgacacacacttggcaatg

SEQ ID NO: 9688 - DNA, 25 bp, Homo sapiens
gctgggccacacacttagtattgtt

SEQ ID NO: 9689 - DNA, 25 bp, Homo sapiens
tttatcagcacacacaaaaaactgt

SEQ ID NO: 9690 - DNA, 25 bp, Homo sapiens
gcaacgcacacacacactgggtagt

SEQ ID NO: 9691 - DNA, 25 bp, Homo sapiens
tgtttaggcaccacagccatctttc

SEQ ID NO: 9692 - DNA, 25 bp, Homo sapiens
gatccgagtcaccacaccaaatttc

SEQ ID NO: 9693 - DNA, 25 bp, Homo sapiens
gacaaacacacagaacagacataac

SEQ ID NO: 9694 - DNA, 25 bp, Homo sapiens
ggcacatctcacacacctgtgtgag

SEQ ID NO: 9695 - DNA, 25 bp, Homo sapiens
gcatgccaaacacatatccatctga

SEQ ID NO: 9696 - DNA, 25 bp, Homo sapiens
tgagcaccgacacatcgtagctggt

SEQ ID NO: 9697 - DNA, 25 bp, Homo sapiens
ggatgttcacacacaccattgtggc

SEQ ID NO: 9698 - DNA, 25 bp, Homo sapiens
cacgaatatgcacacagcgaagggt

SEQ ID NO: 9699 - DNA, 25 bp, Homo sapiens
taatacagcacacaagccttcaagc

SEQ ID NO: 9700 - DNA, 25 bp, Homo sapiens
gggcacatcacacacgtgaatttga

SEQ ID NO: 9701 - DNA, 25 bp, Homo sapiens
gacctagcacacacaaaccaaaact

SEQ ID NO: 9702 - DNA, 25 bp, Homo sapiens
tttaagcacacacaggaccatgatg

SEQ ID NO: 9703 - DNA, 25 bp, Homo sapiens
ctgtggagcagcacacaccagccat

SEQ ID NO: 9704 - DNA, 25 bp, Homo sapiens
tgacacatctcacacacgcatgcgt

SEQ ID NO: 9705 - DNA, 25 bp, Homo sapiens
ggcagcacatcacacacataagcat

SEQ ID NO: 9706 - DNA, 25 bp, Homo sapiens
caggtgtgcgcacacacagtcatct

SEQ ID NO: 9707 - DNA, 25 bp, Homo sapiens
tataaagcacacaactcagaaacag

SEQ ID NO: 9708 - DNA, 25 bp, Homo sapiens
gaagaattcaccttttttcttgctg

SEQ ID NO: 9709 - DNA, 25 bp, Homo sapiens
tagaatggcacacacagcagcttgt

SEQ ID NO: 9710 - DNA, 25 bp, Homo sapiens
ttatgagcacacacacagacgcgtg

SEQ ID NO: 9711 - DNA, 25 bp, Homo sapiens
ggcatgtctcacacacatgcgtgaa

SEQ ID NO: 9712 - DNA, 25 bp, Homo sapiens
tatacgatgcacacacctgggtaga

SEQ ID NO: 9713 - DNA, 25 bp, Homo sapiens
tggacgacacacagaagactgcggg

SEQ ID NO: 9714 - DNA, 25 bp, Homo sapiens
ttgtgctggtcacgcaagcaggaaa

SEQ ID NO: 9715 - DNA, 25 bp, Homo sapiens
aaacccacacattcatatatataca

SEQ ID NO: 9716 - DNA, 25 bp, Homo sapiens
gcaagtccacacatcattcctgtct

SEQ ID NO: 9717 - DNA, 25 bp, Homo sapiens
tgggcttgtcaccatcaccgtgttg

SEQ ID NO: 9718 - DNA, 25 bp, Homo sapiens
gaatagcagtcaccaccacaatatg

SEQ ID NO: 9719 - DNA, 25 bp, Homo sapiens
tatgagcaatgtcaccagcatcctg

SEQ ID NO: 9720 - DNA, 25 bp, Homo sapiens
tgagtgctggtcacgtcctctctgc

SEQ ID NO: 9721 - DNA, 25 bp, Homo sapiens
tctgtacatgctcacgacactgcac

SEQ ID NO: 9722 - DNA, 25 bp, Homo sapiens
tcactgtttcactactcagcatgga

SEQ ID NO: 9723 - DNA, 25 bp, Homo sapiens
cactcatctcttcactgcacggtat

SEQ ID NO: 9724 - DNA, 25 bp, Homo sapiens
agtaattcatcaccaccacacttga

SEQ ID NO: 9725 - DNA, 25 bp, Homo sapiens
aaatgccctcacactgttaaacttg

SEQ ID NO: 9726 - DNA, 25 bp, Homo sapiens
gacacacttcacacaattaactgga

SEQ ID NO: 9727 - DNA, 25 bp, Homo sapiens
attgtatgactcacacgacaccagt

SEQ ID NO: 9728 - DNA, 25 bp, Homo sapiens
ggagctcactcacacaggataacat

SEQ ID NO: 9729 - DNA, 25 bp, Homo sapiens
aggtggcacatcacacacgctcctg

SEQ ID NO: 9730 - DNA, 25 bp, Homo sapiens
gggtgcttcacacacacaggatgct

SEQ ID NO: 9731 - DNA, 25 bp, Homo sapiens
gtacaactcacacgtgctcataaac

SEQ ID NO: 9732 - DNA, 25 bp, Homo sapiens
aggtatatctcacacatgcacgtga

SEQ ID NO: 9733 - DNA, 25 bp, Homo sapiens
ataacaagctcacacatgcgcgtga

SEQ ID NO: 9734 - DNA, 25 bp, Homo sapiens
gcagccttatcacactcacacagtt

SEQ ID NO: 9735 - DNA, 25 bp, Homo sapiens
gcaactgcctcacacaagagggaga

SEQ ID NO: 9736 - DNA, 25 bp, Homo sapiens
tagtgccactcacactcatgcggag

SEQ ID NO: 9737 - DNA, 25 bp, Homo sapiens
caaggagacatcacacacggatgga

SEQ ID NO: 9738 - DNA, 25 bp, Homo sapiens
gggttgctcacacgcacatgctgag

SEQ ID NO: 9739 - DNA, 25 bp, Homo sapiens
aaggcagcacatcacacacataagc

SEQ ID NO: 9740 - DNA, 25 bp, Homo sapiens
ggtacacgcaacgttcacacacagc

SEQ ID NO: 9741 - DNA, 25 bp, Homo sapiens
aggcgcgccgcacacgcttccggtc

SEQ ID NO: 9742 - DNA, 25 bp, Homo sapiens
agcacacagaggcaacggccgcatt

SEQ ID NO: 9743 - DNA, 25 bp, Homo sapiens
cacacacacggcaaggtcaaaaaga

SEQ ID NO: 9744 - DNA, 25 bp, Homo sapiens
ttagagaagcaaaccactgggatat

SEQ ID NO: 9745 - DNA, 25 bp, Homo sapiens
cctgtctcaagcaacagcaacagaa

SEQ ID NO: 9746 - DNA, 25 bp, Homo sapiens
gggaccagcaaccaacagactgagg

SEQ ID NO: 9747 - DNA, 25 bp, Homo sapiens
agttaacagcaacaaatagctctca

SEQ ID NO: 9748 - DNA, 25 bp, Homo sapiens
tctgatataagcaacacacgacatg

SEQ ID NO: 9749 - DNA, 25 bp, Homo sapiens
tatagcaaagcaacaccaacagctg

SEQ ID NO: 9750 - DNA, 25 bp, Homo sapiens
tagtttcagcaacgacagcaacaac

SEQ ID NO: 9751 - DNA, 25 bp, Homo sapiens
tagtccagcagcaaaagagccaatg

SEQ ID NO: 9752 - DNA, 25 bp, Homo sapiens
acacaccacagcaaacaaaaacaca

SEQ ID NO: 9753 - DNA, 25 bp, Homo sapiens
taaagactgcaaccagcctcggagt

SEQ ID NO: 9754 - DNA, 25 bp, Homo sapiens
gctgcctggtgcaagattgcaccca

SEQ ID NO: 9755 - DNA, 25 bp, Homo sapiens
cacaatcactatgcaatacacacac

SEQ ID NO: 9756 - DNA, 25 bp, Homo sapiens
gagctggagctgcaacacactgtct

SEQ ID NO: 9757 - DNA, 25 bp, Homo sapiens
tcactcatgagcatgcaaacccaat

SEQ ID NO: 9758 - DNA, 25 bp, Homo sapiens
aagtgtgtgtgcaatggaaaaaatg

SEQ ID NO: 9759 - DNA, 25 bp, Homo sapiens
tctcaacggcacccaaattggctgc

SEQ ID NO: 9760 - DNA, 25 bp, Homo sapiens
acaatcactatgcaatacacacaca

SEQ ID NO: 9761 - DNA, 25 bp, Homo sapiens
cgagctggagctgcaattcacaata

SEQ ID NO: 9762 - DNA, 25 bp, Homo sapiens
gagctgaggctgcaattatctgaag

SEQ ID NO: 9763 - DNA, 25 bp, Homo sapiens
gaagccggcacccattggaccgggc

SEQ ID NO: 9764 - DNA, 25 bp, Homo sapiens
cacgcgtacgcacactcatttttag

SEQ ID NO: 9765 - DNA, 25 bp, Homo sapiens
ccagcaccacgcacgatggctgttt

SEQ ID NO: 9766 - DNA, 25 bp, Homo sapiens
tggtagcggcacgaagggaatgctg

SEQ ID NO: 9767 - DNA, 25 bp, Homo sapiens
ggagctccgcaccacattcctggag

SEQ ID NO: 9768 - DNA, 25 bp, Homo sapiens
caatgaggcggcactatctagcctg

SEQ ID NO: 9769 - DNA, 25 bp, Homo sapiens
taaacggcaccacctcaaaaggctg

SEQ ID NO: 9770 - DNA, 25 bp, Homo sapiens
ggaacaggcaccaaaaacaggaaga

SEQ ID NO: 9771 - DNA, 25 bp, Homo sapiens
atgacttgcacgcacccgtcttggg

SEQ ID NO: 9772 - DNA, 25 bp, Homo sapiens
ttcctcacgcacagcaagacgcaaa

SEQ ID NO: 9773 - DNA, 25 bp, Homo sapiens
agaaacatggcacccaccaggagga

SEQ ID NO: 9774 - DNA, 25 bp, Homo sapiens
agccagctgggcacgcacagtcatg

SEQ ID NO: 9775 - DNA, 25 bp, Homo sapiens
cagggcaggagcactttccaagatc

SEQ ID NO: 9776 - DNA, 25 bp, Homo sapiens
tgccaaatagcacccacactgaaat

SEQ ID NO: 9777 - DNA, 25 bp, Homo sapiens
gatgatgccacgcacaattgggttt

SEQ ID NO: 9778 - DNA, 25 bp, Homo sapiens
gtttagagcaccaaccacttcaaga

SEQ ID NO: 9779 - DNA, 25 bp, Homo sapiens
tctgaacacgcacatatactcttgg

SEQ ID NO: 9780 - DNA, 25 bp, Homo sapiens
cgtagactggcacacacatgggtat

SEQ ID NO: 9781 - DNA, 25 bp, Homo sapiens
gtctaatggcacacacacgggagct

SEQ ID NO: 9782 - DNA, 25 bp, Homo sapiens
gctctcagacgcacagacatttcag

SEQ ID NO: 9783 - DNA, 25 bp, Homo sapiens
gcgtgctcggcacacagacagattt

SEQ ID NO: 9784 - DNA, 25 bp, Homo sapiens
gaactacgcacacgtagacagacca

SEQ ID NO: 9785 - DNA, 25 bp, Homo sapiens
cagagtagacgcacaccgatagagg

SEQ ID NO: 9786 - DNA, 25 bp, Homo sapiens
tcggagcaggcacactcgctgccag

SEQ ID NO: 9787 - DNA, 25 bp, Homo sapiens
tgtactgggcacacccacatttctc

SEQ ID NO: 9788 - DNA, 25 bp, Homo sapiens
tcttgacaagcacaacaaactgatg

SEQ ID NO: 9789 - DNA, 25 bp, Homo sapiens
tctgaaaagcacacccagcaagtcc

SEQ ID NO: 9790 - DNA, 25 bp, Homo sapiens
tcggtgacatgcacacactcgctgt

SEQ ID NO: 9791 - DNA, 25 bp, Homo sapiens
acagcttcgcgcacacacagcaagg

SEQ ID NO: 9792 - DNA, 25 bp, Homo sapiens
tgtggcaggagcacaaaaagtctct

SEQ ID NO: 9793 - DNA, 25 bp, Homo sapiens
tacaccacgcacatgagatggaggc

SEQ ID NO: 9794 - DNA, 25 bp, Homo sapiens
gacgagcgcgcacacaggaagcctg

SEQ ID NO: 9795 - DNA, 25 bp, Homo sapiens
tagttttgcactcttttttgtccag

SEQ ID NO: 9796 - DNA, 25 bp, Homo sapiens
tttcaaagcacaccaactgctctgg

SEQ ID NO: 9797 - DNA, 25 bp, Homo sapiens
cgcaggatccagcacacacaaggcg

SEQ ID NO: 9798 - DNA, 25 bp, Homo sapiens
tgaatcaatgagcacagccaccagg

SEQ ID NO: 9799 - DNA, 25 bp, Homo sapiens
catgtgcacactcgcacatgcacat

SEQ ID NO: 9800 - DNA, 25 bp, Homo sapiens
ggtgtgtgtgcaccgaaggtccacc

SEQ ID NO: 9801 - DNA, 25 bp, Homo sapiens
gtaacgccagccacgatttttcgta

SEQ ID NO: 9802 - DNA, 25 bp, Homo sapiens
ctacacacaagcacatgtgcacaca

SEQ ID NO: 9803 - DNA, 25 bp, Homo sapiens
tccagccagccaggctatttaaggg

SEQ ID NO: 9804 - DNA, 25 bp, Homo sapiens
gcggcggccaggagcgcccgcgggc

SEQ ID NO: 9805 - DNA, 25 bp, Homo sapiens
gttgccgccagttcgaggtgctcca

SEQ ID NO: 9806 - DNA, 25 bp, Homo sapiens
gtgagctctccaggcccttggttct

SEQ ID NO: 9807 - DNA, 25 bp, Homo sapiens
tacaccaccagtcatcatcattggt

SEQ ID NO: 9808 - DNA, 25 bp, Homo sapiens
tacccagacaggagattctaccacg

SEQ ID NO: 9809 - DNA, 25 bp, Homo sapiens
acagccagccacaggtactgcaagg

SEQ ID NO: 9810 - DNA, 25 bp, Homo sapiens
agaagccacacaggcgaagcctagt

SEQ ID NO: 9811 - DNA, 25 bp, Homo sapiens
tcacactcagacaggaaacacagac

SEQ ID NO: 9812 - DNA, 25 bp, Homo sapiens
cagaagccacacaggcgaagcctag

SEQ ID NO: 9813 - DNA, 25 bp, Homo sapiens
cattgtgccacacaggcaatgagca

SEQ ID NO: 9814 - DNA, 25 bp, Homo sapiens
cagccagccaacagtagtagtagaa

SEQ ID NO: 9815 - DNA, 25 bp, Homo sapiens
cggcaccaccagaagtcaggaaaag

SEQ ID NO: 9816 - DNA, 25 bp, Homo sapiens
cgcaggtggacagtgcttacgctat

SEQ ID NO: 9817 - DNA, 25 bp, Homo sapiens
tggccaaccagaacctagattatca

SEQ ID NO: 9818 - DNA, 25 bp, Homo sapiens
agagtccccagaacacctactggtc

SEQ ID NO: 9819 - DNA, 25 bp, Homo sapiens
agcgcatgaacacagtcacccacta

SEQ ID NO: 9820 - DNA, 25 bp, Homo sapiens
cacagagacccagacgtagttttct

SEQ ID NO: 9821 - DNA, 25 bp, Homo sapiens
cctcaccagccagaccagttgaata

SEQ ID NO: 9822 - DNA, 25 bp, Homo sapiens
gcacatccatccagaattgtcaggg

SEQ ID NO: 9823 - DNA, 25 bp, Homo sapiens
gaactatccagacacacaaggtttt

SEQ ID NO: 9824 - DNA, 25 bp, Homo sapiens
cgattccagccagacagatgagcgg

SEQ ID NO: 9825 - DNA, 25 bp, Homo sapiens
gccccacacagaactcgtacaggaa

SEQ ID NO: 9826 - DNA, 25 bp, Homo sapiens
gaaatagacagaacacacattcagg

SEQ ID NO: 9827 - DNA, 25 bp, Homo sapiens
ggtcaatgacagacaccaagcgggt

SEQ ID NO: 9828 - DNA, 25 bp, Homo sapiens
atgcaaaagcacagacacgtccctg

SEQ ID NO: 9829 - DNA, 25 bp, Homo sapiens
aaaaaacagagacagctgggacagt

SEQ ID NO: 9830 - DNA, 25 bp, Homo sapiens
catatacgatcacagacacacacca

SEQ ID NO: 9831 - DNA, 25 bp, Homo sapiens
tgtacagaacagagacccaagatgt

SEQ ID NO: 9832 - DNA, 25 bp, Homo sapiens
tgtaaggacagacacacccacagaa

SEQ ID NO: 9833 - DNA, 25 bp, Homo sapiens
gagaacacacagacatcacatcttc

SEQ ID NO: 9834 - DNA, 25 bp, Homo sapiens
ccagagacagacagacgcacgcaca

SEQ ID NO: 9835 - DNA, 25 bp, Homo sapiens
ggagatacacagacccagagacact

SEQ ID NO: 9836 - DNA, 25 bp, Homo sapiens
gatgaaacacagagacagcaagttc

SEQ ID NO: 9837 - DNA, 25 bp, Homo sapiens
gatcccactcaggaagaatgcacca

SEQ ID NO: 9838 - DNA, 25 bp, Homo sapiens
tgcccacactcagttcacaggaaga

SEQ ID NO: 9839 - DNA, 25 bp, Homo sapiens
gcggtgagatcaggcccatggcatt

SEQ ID NO: 9840 - DNA, 25 bp, Homo sapiens
gatatgtccatcaggtccatctgct

SEQ ID NO: 9841 - DNA, 25 bp, Homo sapiens
tccctctctcagtgtgtgtgtctct

SEQ ID NO: 9842 - DNA, 25 bp, Homo sapiens
cattttttcagagcttgtttgcagg

SEQ ID NO: 9843 - DNA, 25 bp, Homo sapiens
tagttgtatcagaatgagcatcaga

SEQ ID NO: 9844 - DNA, 25 bp, Homo sapiens
aaggcacccagcttcagtatctagt

SEQ ID NO: 9845 - DNA, 25 bp, Homo sapiens
agtggagcggcagccagataactct

SEQ ID NO: 9846 - DNA, 25 bp, Homo sapiens
accaccaccagctgatgattctctt

SEQ ID NO: 9847 - DNA, 25 bp, Homo sapiens
tctgactctccagccaccaagaata

SEQ ID NO: 9848 - DNA, 25 bp, Homo sapiens
tgaacacccagcctgatttcacagg

SEQ ID NO: 9849 - DNA, 25 bp, Homo sapiens
tgcaaagaccagcactctaaaggcc

SEQ ID NO: 9850 - DNA, 25 bp, Homo sapiens
cccacactcacagcggtaggagttt

SEQ ID NO: 9851 - DNA, 25 bp, Homo sapiens
ggaccaccagcctaacctggcatga

SEQ ID NO: 9852 - DNA, 25 bp, Homo sapiens
cattgaacaacagccagcacttaaa

SEQ ID NO: 9853 - DNA, 25 bp, Homo sapiens
gaaaaacagccacaacagagagaac

SEQ ID NO: 9854 - DNA, 25 bp, Homo sapiens
aagcgccagccagcagtgaaagaaa

SEQ ID NO: 9855 - DNA, 25 bp, Homo sapiens
ctgctgagactcacagcccacaggg

SEQ ID NO: 9856 - DNA, 25 bp, Homo sapiens
tgtgtagacacagccactgagggat

SEQ ID NO: 9857 - DNA, 25 bp, Homo sapiens
tgagacacacacagcggctgggacc

SEQ ID NO: 9858 - DNA, 25 bp, Homo sapiens
tcagacacacacagctagagggctc

SEQ ID NO: 9859 - DNA, 25 bp, Homo sapiens
tccaaagccagcaacatcgatcagc

SEQ ID NO: 9860 - DNA, 25 bp, Homo sapiens
tggcaaccacagcaacaaagaggat

SEQ ID NO: 9861 - DNA, 25 bp, Homo sapiens
gacagccaccagcaaatacacaggt

SEQ ID NO: 9862 - DNA, 25 bp, Homo sapiens
tggatcacacacagcatagtagcgg

SEQ ID NO: 9863 - DNA, 25 bp, Homo sapiens
ccacacaaacagcacacaccacata

SEQ ID NO: 9864 - DNA, 25 bp, Homo sapiens
acttcgcacacagcaccagaggctg

SEQ ID NO: 9865 - DNA, 25 bp, Homo sapiens
tatgtacacacagcaacatgcatgg

SEQ ID NO: 9866 - DNA, 25 bp, Homo sapiens
tgatcacaacacagcacgtctaacg

SEQ ID NO: 9867 - DNA, 25 bp, Homo sapiens
ctgacaggctcacagcacagagtgg

SEQ ID NO: 9868 - DNA, 25 bp, Homo sapiens
gcagggagtgcagccattggtacac

SEQ ID NO: 9869 - DNA, 25 bp, Homo sapiens
tctggacaggcaggtaaccaagtcg

SEQ ID NO: 9870 - DNA, 25 bp, Homo sapiens
tcccgaggcagggacgtaggtcaca

SEQ ID NO: 9871 - DNA, 25 bp, Homo sapiens
taggagatggcaggaactccgttcc

SEQ ID NO: 9872 - DNA, 25 bp, Homo sapiens
gtatctgtggcaggcggagttccct

SEQ ID NO: 9873 - DNA, 25 bp, Homo sapiens
tagcaagcacgcaggccttgtgggt

SEQ ID NO: 9874 - DNA, 25 bp, Homo sapiens
ttccttggcagggagcacagtggca

SEQ ID NO: 9875 - DNA, 25 bp, Homo sapiens
gataggtggcagaattcccttgtaa

SEQ ID NO: 9876 - DNA, 25 bp, Homo sapiens
ttattctggcagttcacgcacacgg

SEQ ID NO: 9877 - DNA, 25 bp, Homo sapiens
cacagacaacagcagtagaactcat

SEQ ID NO: 9878 - DNA, 25 bp, Homo sapiens
gcccacacagcagtgcaagttccat

SEQ ID NO: 9879 - DNA, 25 bp, Homo sapiens
ggcagtgagagcaggtccatccact

SEQ ID NO: 9880 - DNA, 25 bp, Homo sapiens
cagaagaggagcaggttgaagccac

SEQ ID NO: 9881 - DNA, 25 bp, Homo sapiens
ccacagcacaagcagtatttgacat

SEQ ID NO: 9882 - DNA, 25 bp, Homo sapiens
tcgtcacacgcagaccacagggtgt

SEQ ID NO: 9883 - DNA, 25 bp, Homo sapiens
agcacaccacagcagagtgtaacta

SEQ ID NO: 9884 - DNA, 25 bp, Homo sapiens
tcagtgagggcagaggtacagaacc

SEQ ID NO: 9885 - DNA, 25 bp, Homo sapiens
ccgctgggtgcaggagtaagacgtc

SEQ ID NO: 9886 - DNA, 25 bp, Homo sapiens
atatgtgtgtgtgcaggtcctggac

SEQ ID NO: 9887 - DNA, 25 bp, Homo sapiens
gcatcaaattgcagcaacacgagaa

SEQ ID NO: 9888 - DNA, 25 bp, Homo sapiens
tcttgggcagcagcgatgataaact

SEQ ID NO: 9889 - DNA, 25 bp, Homo sapiens
gtgtgtgtgtgcaggtacatataca

SEQ ID NO: 9890 - DNA, 25 bp, Homo sapiens
gagggcattgcagcaaccacacctg

SEQ ID NO: 9891 - DNA, 25 bp, Homo sapiens
gctgctggtggcagccgtggtcatg

SEQ ID NO: 9892 - DNA, 25 bp, Homo sapiens
cacctaaggcagcaagttacgtcac

SEQ ID NO: 9893 - DNA, 25 bp, Homo sapiens
tactgagatgtgcagaggacagaca

SEQ ID NO: 9894 - DNA, 25 bp, Homo sapiens
caataggcctgcagagtcatagtca

SEQ ID NO: 9895 - DNA, 25 bp, Homo sapiens
ggtctttgcagcgtgcacacacagc

SEQ ID NO: 9896 - DNA, 25 bp, Homo sapiens
ttcagtagaattgggttgcaatcca

SEQ ID NO: 9897 - DNA, 25 bp, Homo sapiens
tgcttcctgaattggatctccaaat

SEQ ID NO: 9898 - DNA, 25 bp, Homo sapiens
tgacaaggcaatacacaccaaccaa

SEQ ID NO: 9899 - DNA, 25 bp, Homo sapiens
atacataccaatacacaccactaca

SEQ ID NO: 9900 - DNA, 25 bp, Homo sapiens
tcttggcaaataggtgagagaacta

SEQ ID NO: 9901 - DNA, 25 bp, Homo sapiens
caatcactatgcaatacacacacat

SEQ ID NO: 9902 - DNA, 25 bp, Homo sapiens
tctttagtataattttttgaactga

SEQ ID NO: 9903 - DNA, 25 bp, Homo sapiens
ggctacatcaataagcacacaccag

SEQ ID NO: 9904 - DNA, 25 bp, Homo sapiens
tccacacacatattactcatagttt

SEQ ID NO: 9905 - DNA, 25 bp, Homo sapiens
tgccaccagctatacacactaccaa

SEQ ID NO: 9906 - DNA, 25 bp, Homo sapiens
ttttttatattgtctcagtatgact

SEQ ID NO: 9907 - DNA, 25 bp, Homo sapiens
tgtgcctgtgtatatgcgaatctca

SEQ ID NO: 9908 - DNA, 25 bp, Homo sapiens
catatacaaaatccacacacatgaa

SEQ ID NO: 9909 - DNA, 25 bp, Homo sapiens
tggattgaaatccagccagcccagg

SEQ ID NO: 9910 - DNA, 25 bp, Homo sapiens
ttgctgactaatctgatctccgcag

SEQ ID NO: 9911 - DNA, 25 bp, Homo sapiens
gatgctccacaatctggtctgaggt

SEQ ID NO: 9912 - DNA, 25 bp, Homo sapiens
gactcatgatgaatcttccgtgatg

SEQ ID NO: 9913 - DNA, 25 bp, Homo sapiens
gtcataggacatcaccaccagtagg

SEQ ID NO: 9914 - DNA, 25 bp, Homo sapiens
tacacagtgaatcacacacagaaac

SEQ ID NO: 9915 - DNA, 25 bp, Homo sapiens
gaaatcgcaatcaacagcaccagta

SEQ ID NO: 9916 - DNA, 25 bp, Homo sapiens
ctgaggctgcactatcgcacgggtc

SEQ ID NO: 9917 - DNA, 25 bp, Homo sapiens
aggatggcctatctcacacatgaat

SEQ ID NO: 9918 - DNA, 25 bp, Homo sapiens
tcaaagggattacgatactgcggca

SEQ ID NO: 9919 - DNA, 25 bp, Homo sapiens
taacaaggattgagtagggcacatc

SEQ ID NO: 9920 - DNA, 25 bp, Homo sapiens
cacaagccgagattagatcaatcag

SEQ ID NO: 9921 - DNA, 25 bp, Homo sapiens
catgagggagagattggaacactcg

SEQ ID NO: 9922 - DNA, 25 bp, Homo sapiens
tgggctgtggatagccttccgcgat

SEQ ID NO: 9923 - DNA, 25 bp, Homo sapiens
cagtgaggatggataagatgtcttc

SEQ ID NO: 9924 - DNA, 25 bp, Homo sapiens
ggagcgcgcgataacgcacgcatgg

SEQ ID NO: 9925 - DNA, 25 bp, Homo sapiens
tagcggcggataggctcacaggcca

SEQ ID NO: 9926 - DNA, 25 bp, Homo sapiens
catgtctggccgatactgtttccgc

SEQ ID NO: 9927 - DNA, 25 bp, Homo sapiens
ccagatcccgatatgctttgcaggc

SEQ ID NO: 9928 - DNA, 25 bp, Homo sapiens
gataagaagatacacacccacaatg

SEQ ID NO: 9929 - DNA, 25 bp, Homo sapiens
gtgtgcgtgtgattaggcttcccca

SEQ ID NO: 9930 - DNA, 25 bp, Homo sapiens
tcaagggtgatagatgagggtcatc

SEQ ID NO: 9931 - DNA, 25 bp, Homo sapiens
aagttgagatgatatcatttacggg

SEQ ID NO: 9932 - DNA, 25 bp, Homo sapiens
tgatgtttggatccctgagcaccct

SEQ ID NO: 9933 - DNA, 25 bp, Homo sapiens
gaaccggatcttctggtcattgtgg

SEQ ID NO: 9934 - DNA, 25 bp, Homo sapiens
ggctcttggatcacacacagacaaa

SEQ ID NO: 9935 - DNA, 25 bp, Homo sapiens
gggtgatgcgatcaaggcacacaca

SEQ ID NO: 9936 - DNA, 25 bp, Homo sapiens
gcaatgaggtatgacctagagttaa

SEQ ID NO: 9937 - DNA, 25 bp, Homo sapiens
agtgtgtgtgcaatggaaaaaatgt

SEQ ID NO: 9938 - DNA, 25 bp, Homo sapiens
cagatgggtaatgtgctgacgtcat

SEQ ID NO: 9939 - DNA, 25 bp, Homo sapiens
attatagtaatgacacacagccaag

SEQ ID NO: 9940 - DNA, 25 bp, Homo sapiens
tgttacatgaatgaaccagacaact

SEQ ID NO: 9941 - DNA, 25 bp, Homo sapiens
cacacaccagaatgatccagagacc

SEQ ID NO: 9942 - DNA, 25 bp, Homo sapiens
cacacacgcgtatggagacttgatg

SEQ ID NO: 9943 - DNA, 25 bp, Homo sapiens
tgtggtgtgtatgtacatggtgcct

SEQ ID NO: 9944 - DNA, 25 bp, Homo sapiens
caactgggtatggttcagatctgca

SEQ ID NO: 9945 - DNA, 25 bp, Homo sapiens
ggcatagaatatggacaccaccttg

SEQ ID NO: 9946 - DNA, 25 bp, Homo sapiens
caccttgacgatgtccgcgggtggc

SEQ ID NO: 9947 - DNA, 25 bp, Homo sapiens
ggacatgccgatgttttcagaaaca

SEQ ID NO: 9948 - DNA, 25 bp, Homo sapiens
ctggagacagagatgtgggccatca

SEQ ID NO: 9949 - DNA, 25 bp, Homo sapiens
ttgtgtgtggatgactgcacactca

SEQ ID NO: 9950 - DNA, 25 bp, Homo sapiens
taaatcgtgatgcagtaaagcctac

SEQ ID NO: 9951 - DNA, 25 bp, Homo sapiens
gacttgctgctgatgtgacgcttgc

SEQ ID NO: 9952 - DNA, 25 bp, Homo sapiens
tcttgcggctgatgctgcggaactc

SEQ ID NO: 9953 - DNA, 25 bp, Homo sapiens
gcagtgtgtgccattacttttaaat

SEQ ID NO: 9954 - DNA, 25 bp, Homo sapiens
ctgtccacaccataaaaactcctgg

SEQ ID NO: 9955 - DNA, 25 bp, Homo sapiens
cagagcaacacacatttcctagagg

SEQ ID NO: 9956 - DNA, 25 bp, Homo sapiens
tcactcgcacacatactgccatata

SEQ ID NO: 9957 - DNA, 25 bp, Homo sapiens
tccagccagcacattgcagtgttca

SEQ ID NO: 9958 - DNA, 25 bp, Homo sapiens
cacaccacttcattgctcttggaag

SEQ ID NO: 9959 - DNA, 25 bp, Homo sapiens
tagagaaatcattgcacgcacggag

SEQ ID NO: 9960 - DNA, 25 bp, Homo sapiens
tgcctgccactcatttcattagttt

SEQ ID NO: 9961 - DNA, 25 bp, Homo sapiens
aacccatccatcgacccattgagag

SEQ ID NO: 9962 - DNA, 25 bp, Homo sapiens
caaaagactcatacgccaccagtag

SEQ ID NO: 9963 - DNA, 25 bp, Homo sapiens
tcctacagccatccagcaaacattt

SEQ ID NO: 9964 - DNA, 25 bp, Homo sapiens
atatatctcccatccaagtgctaac

SEQ ID NO: 9965 - DNA, 25 bp, Homo sapiens
tcatagcaatgccatccatccagac

SEQ ID NO: 9966 - DNA, 25 bp, Homo sapiens
tcagtcaaacatccacacaatacag

SEQ ID NO: 9967 - DNA, 25 bp, Homo sapiens
aaggccacacatccaaaacgacaag

SEQ ID NO: 9968 - DNA, 25 bp, Homo sapiens
tgtctggaacatcaccaccgcatgt

SEQ ID NO: 9969 - DNA, 25 bp, Homo sapiens
cttgttcacacatccactccttcac

SEQ ID NO: 9970 - DNA, 25 bp, Homo sapiens
acccagcacacatcacatacacaac

SEQ ID NO: 9971 - DNA, 25 bp, Homo sapiens
ttggacaccatcagcacaaagtgag

SEQ ID NO: 9972 - DNA, 25 bp, Homo sapiens
tagtctcatccatcaagggcatagg

SEQ ID NO: 9973 - DNA, 25 bp, Homo sapiens
tgtctcaagacatctgaaacaggca

SEQ ID NO: 9974 - DNA, 25 bp, Homo sapiens
aggaatacacatcaccacctccgtg

SEQ ID NO: 9975 - DNA, 25 bp, Homo sapiens
tggaaacacatcacacactcctcag

SEQ ID NO: 9976 - DNA, 25 bp, Homo sapiens
ccaaaaatcatcaagacaggcctgg

SEQ ID NO: 9977 - DNA, 25 bp, Homo sapiens
aacaaacacatctgcaacgggttga

SEQ ID NO: 9978 - DNA, 25 bp, Homo sapiens
gcagtcacactcatctttcctaaag

SEQ ID NO: 9979 - DNA, 25 bp, Homo sapiens
ggcatgcaccacatcacacaagtcg

SEQ ID NO: 9980 - DNA, 25 bp, Homo sapiens
tcaaggagacatcacacacggatgg

SEQ ID NO: 9981 - DNA, 25 bp, Homo sapiens
ggcaggacacatcaccaggactgat

SEQ ID NO: 9982 - DNA, 25 bp, Homo sapiens
gcgtgtttcatcgtggctgctgtct

SEQ ID NO: 9983 - DNA, 25 bp, Homo sapiens
gatgagggtcatcactgcgcaaagc

SEQ ID NO: 9984 - DNA, 25 bp, Homo sapiens
actgatctctctcatccactcatag

SEQ ID NO: 9985 - DNA, 25 bp, Homo sapiens
gaacactgagcatagacatagcctc

SEQ ID NO: 9986 - DNA, 25 bp, Homo sapiens
tgtgatggaagcataacctgtctca

SEQ ID NO: 9987 - DNA, 25 bp, Homo sapiens
tgtagtgtgtgcatagtggtgtgtg

SEQ ID NO: 9988 - DNA, 25 bp, Homo sapiens
caagggtggcatatctcacacacct

SEQ ID NO: 9989 - DNA, 25 bp, Homo sapiens
gcctgtgatcagcatatgtcccata

SEQ ID NO: 9990 - DNA, 25 bp, Homo sapiens
gttagccagcatcacacaaggagag

SEQ ID NO: 9991 - DNA, 25 bp, Homo sapiens
cctggctctgctgcatttgggcctg

SEQ ID NO: 9992 - DNA, 25 bp, Homo sapiens
tcacccatggcatcatcaatggcat

SEQ ID NO: 9993 - DNA, 25 bp, Homo sapiens
ggcaacacacatgcagtaagccttt

SEQ ID NO: 9994 - DNA, 25 bp, Homo sapiens
cacacctcacacatgggcttgagca

SEQ ID NO: 9995 - DNA, 25 bp, Homo sapiens
cacatcttacacatgaggtgaaacc

SEQ ID NO: 9996 - DNA, 25 bp, Homo sapiens
aaaccatgtcatgtgaaagcactgg

SEQ ID NO: 9997 - DNA, 25 bp, Homo sapiens
tacacagcccatgcaatgagcacat

SEQ ID NO: 9998 - DNA, 25 bp, Homo sapiens
tgcccgctctgcatggctgctgtgc

SEQ ID NO: 9999 - DNA, 25 bp, Homo sapiens
gctggtggctgcatgaaatccttaa

SEQ ID NO: 10000 - DNA, 25 bp, Homo sapiens
taacctgtgcatgctcacacagccg

SEQ ID NO: 10001 - DNA, 25 bp, Homo sapiens
acttcacacacatgcctcaggtggg

1. A method for analyzing a biological sample, comprising:
(a) receiving the biological sample from a subject;
(b) wherein when the subject is a female subject, assaying expression levels of two or more genes from a female targeted set of genes to generate an output comprising the expression levels from (b) indicative of the female subject's having a condition selected from ischemic cardiovascular disease, ischemic heart disease, coronary artery disease, cardiovascular congenital disease, hypertrophic or dilating cardiomyopathy, heart failure;
(c) wherein when the subject is a male subject, assaying expression levels of two or more genes from a male targeted set of genes to generate an output comprising the expression levels from (c) indicative of the male subject's having a condition selected from ischemic cardiovascular disease, ischemic heart disease, coronary artery disease, cardiovascular congenital disease, hypertrophic or dilating cardiomyopathy, heart failure; and
(d) providing a treatment to the subject, the treatment selected from the group consisting of beta-blockers, calcium channels antagonists, nitrates, aspirin, cholesterol-lowering compounds, angiotensin converting enzyme (ACE) inhibitors, and ranolazine.

2-4. (canceled)

5. The method of claim 1, wherein the female target set of genes comprises one or more, two or more, three or more, four or more, five or more, six or more, seven or more, eight or more, nine or more, ten or more, twenty or more, thirty or more, forty or more, fifty or more, sixty or more, seventy or more, eighty or more, ninety or more, one hundred or more, two hundred or more, or three hundred or more of the genes selected from the group consisting of ZNF807, LOC100130331, LOC100130872, LINC01502, FAM66A, SRGAP3-AS3, MIR1185-1, MIR1266, MIR1261, MIR4262, MTRNR2L10, MIR3928, LOC100507065, LOC100507642, MIR1273F, MIR4519, MIR4799, MIR4747, PTPRU, LOC100996660, DNAL4, XXYLT1-AS2, LOC101927230, LOC101927377, LOC101927479, LOC101927503, LINC01186, LOC101927735, LOC101927880, LINC01486, LOC101928775, RHOXF1P1, LOC101929108, LOC101929330, LOC101929696, CEACAM5, LAMTOR5, CELP, SLC27A4, RCC1, STMN2, CAPN11, FDX1L, MIR155HG, CSMD2, PNMA5, HSPA12B, CLN5, LRRC38, COL3A1, ARHGEF19, PROKR2, COX6C, PTRH1, KRTAP13-1, ASB9, CRYGC, VTI1A, BEST3, SLC22A31, ADIG, LINC01104, PYDC2, PRSS3P2, OTUD7A, DCC, RBM46, TCEANC, ADAMTS17, EFNA5, CELSR2, U2AF1L4, PIKFYVE, KCTD6, PTPLB, EMX1, OR9I1, JAZF1, LAMB4, FOXC2, NCOA6, MESDC2, FBX028, DNMBP, U2SURP, ABCA6, CBX5, CBLC, KIF4A, C20orfI 66-AS1, NUDT8, NUP210P1, SMCOI, MAP7D2, ALX3, FAM133B, SUN2, HECTD1, WIPI2, SNORD53, GJA8, DHDH, GPR4, MRGPRG-AS 1, LOC283731, LINC00304, ZNF763, IGHV1-58, LOC284933, RBMY1A3P, GPX5, MED4, C6orfI5, GUCY1A2, GUCA2A, HUNK, TFAP2E, POTEA, LEUTX, OR2T3, IGFALS, C19orf45, FAM99A, IGFL3, OR2M1P, FAM90A25P, C8orf86, TMEM8C, PABPN1L, LIG4, FLJ26245, KRT16P2, PRSS57, LTBP3, MIR215, ARSF, MEF2C, IQSEC3, LOC441179, ZNRF2P1, MT1M, MTIF2, MY07A, NDUFB9, ATP2B1, MIR422A, CEND1, LARS, UFM1, PDHA2, CES1P1, PLTP, LURAP1, MRPS21, MED1, PPP1R3C, RBM41, ASIC4, ZNF821, PPP1R9A, TRMU, UTP6, CCDC177, TBC1D24, GPR158, NYNRIN, BAI2, GBA3, PTPRO, RAC3, CDH26, RPLPO, BGN, FAM204A, PJA1, MT1IP, SHBG, LOC646513, SLA, SKOR2, SLC34A1, SNRPD1, SOX9, SP1, MIR532, TDG, TNNI3, DNLZ, LOC729739, CBA, VIPR2, USP7, DDX39B, ICE2, DCSTAMP, HIST1H4J, ZNF484, REG4, LRRIQ1, FAM126A, DOCK7, RNMT, ST3GAL5, GAL3ST3, SLC25A21, FATE1, UNC5A, TBX18, FIBP, DLGAP1, MGME1, SYCE1, HAND1, TNFRSF8, MAP4K4, GOSR1, SETDB1, SLC23A2, DOPEY2, and TBX5-AS1.

6-7. (canceled)

8. The method of claim 1, wherein the male target set of genes comprises one or more, two or more, three or more, four or more, five or more, six or more, seven or more, eight or more, nine or more, ten or more, twenty or more, thirty or more, forty or more, fifty or more, sixty or more, seventy or more, eighty or more, ninety or more, one hundred or more, two hundred or more, or three hundred or more of the genes selected from the group consisting of SNORD115-37, SNORD115-24, SNORA11B, MIR876, COL4A2-AS2, LOC100130373, LOC100130548, LOC100131496, LINC00240, BCL2L11, MED 16, ERVV-2, KRTAP21-3, LOC100289230, LOC100289283, MIR1275, MIR1912, MIR1302-7, MIR1231, MIR1238, MIR1179, MIR1908, MIR1237, MIR2116, CSN1S2BP, MIR3148, MIR4280, MIR3116-1, MIR3129, MIR4275, MIR4326, MIR4254, LINC00673, MIR3926-2, MIR3678, MIR548Z, MIR3657, MIR3935, LOC100505478, LINC01364, C16orf95, LINC00837, MIR3529, MIR4475, MIR4492, MIR4784, MIR4732, MIR4684, MIR4773-2, MIR4429, MIR4442, LINC00507, LOC100996345, CYYR1-AS1, LOC100996635, C D K4, LOC101927053, PDZRN3-AS1, MEOX2-AS1, LINCOI 186, NA, GBAT2, LINC01214, LOC101928101, LOC101928118, NA, LOC101928195, LOC101928385, TCONS_00029157, LOC101928668, LINC01450, NA, LOC101928823, LOC101928919, LINC01262, LOC101929031, LOC101929159, LOC101929468, LOC101929497, ZNF267, CHERP, IFI44, FUT9, RFPL2, IFI44L, MAPRE2, SLC27A5, CHD1, RABL2B, FSTL1, MRPL3, GLB1L3, GPR182, CHRM5, SMIM12, LRRC37B, SMYD4, TBCB, KLHDC3, RPL39L, CLTB, PRSS30P, PCP2, FITM2, SNTN, TMEM68, OTUD6A, CRP, DYNLL2, CRYGD, NA, TMC8, CSTB, SLC35F3, CCDC140, WDSUB1, SH3D19, TEX28, FEZF1-AS1, ESC02, ZNF645, CYP51A1, DAB1, ZCCHC12, DNMT3A, DRP2, EGR2, ABCA2, CDY2B, SENP5, EVI2B, ALCAM, ABCD1, F12, FAH, OR5A2, CCDC89, FABP5P3, FGF4, FGF14, DIP2A, ATP1 IB, NUP210, EXOC6B, ARC, SASH1, GRIP1, SEC61G, SCRIB, POLA2, GABARAPL1, DEFB108B, DEFB113, FTH1P3, CDRT15L2, HEATR9, ALS2CL, ASPM, OR2F1, GATA2, PLA2G2D, GCNT1, AGOI, OR7A5, OR1J2, SNORA70, GNAI3, BCL9L, OTOGL, SLC46A3, EWSAT1, LINC00927, C16orf54, MAMSTR, MCHR1, LOC284825, IGHD2-21, IGHD2-15, EOGT, C8orf31, IGLV10-54, IGLV3-12, SNX24, ARHGAP35, SCG3, PYCR2, SLC39A3, H3F3B, ANXA5, CXXC1, CDR2L, HNF4A, HNRNPK, SNORD56B, KRTAP20-1, KRTAP20-2, LOC339166, ZFP69, LOC340074, KIAA1875, OR2T8, PAQR9, IFNGR1, IGFBP1, KRTAPIO-IO, IL13RA1, KCNA3, KCNA5, TPTE2P6, LHFPL3, KCNJ10, LINC00162, KCNS3, KRTAP5-1, CC2D2B, RPRML, LRRC14B, OR52N2, LAMA4, LIPE, LINC00200, LINC00668, ZNF880, LOC400756, ASB18, LRRDI, LDLRAD2, LYN, MIR127, MIR210, MIR181A1, MIR9-1, MIR98, MIR99B, MIR17HG, MAFG, MAS1, MAX, MLF1, SUGT1P1, RPS26P11, MYOIO, NDUFB9, NKX3-1, NOS1, NRGN, MIR375, DUOX2, RRP15, NMD3, KLHL5, RPL26L1, EGFL7, PCYT1A, CDC40, UFC1, ERGIC3, SF3B6, PFDN4, PIK3C2G, DDIT4, EGLN1, FAM20A, HEATR3, CEP72, THSD1, PSME2, MIR362, MIR494, MIR520C, MIR51662, MIR502, MIR508, ERMN, RANBP10, SH3RF1, FBRSL1, RET, EXOC4, TGIF2, RPL3L, BCORL1, CCL5, SDCBP, RRAGC, XYLT2, ACOT6, POPDC3, LINC00535, CCT6P1, TSG1, NA, BLVRA, NARFL, CSMD1, SGSH, NDST4, NA, EFTUD1P1, SIPA1, SLC5A4, PCP4L1, SLC9A2, LYNX1, MIR539, CAPN15, SPAG1, SPRR3, SQLE, SRI, SCARNA2, SCARNA16, TACR1, SNORD66, SNORD84, SNORD91A, SNORD97, MIR552, MIR563, MIR591, TCF19, TNP1, MIR660, SDHAP3, LOC729224, FAHD2CP, SEC14L6, MEIS1-AS3, WNT9A, SNORD113-3, SNORD114-3, SNORD1 14-9, SNORD114-18, SNORD114-27, SNORD114-30, MIR758, MIR668, ZNF134, PPDPF, OR5H2, CERS4, OGFOD2, LIN28A, NEK11, DCAKD, GPR157, EFHC2, CXXC4, PBX4, CPTP, NPRL3, OR2B2, AKAP17A, PCDH11Y, FAM103A1, TRAPPC9, HYAL3, CASP5, TTTY11, RAB34, NACAP1, SPOP, ZMYND12, LLPH, C22orf23, GTPBP3, SUV420H2, HAT1, SHANK3, KIAA1755, DENR, NPFF, MARCO, JRKL, PAGE1, PABPC4, SYNGAP1, SGPL1, BUD31, HIST1H3F, SYT8, MAP7, ZFAND2A, RGN, VAPB, RCSD1, SLIT2, NCR2, PAGE4, RNF7, MTFR1, CD59, and ATP2C2.

9. The method of claim 1, further comprising obtaining a range of control expression levels of the female targeted set of genes and comparing the expression levels of (b) with the range of control expression levels of the female targeted set of genes.

10. (canceled)

11. The method of claim 1, further comprising obtaining a range of control expression levels of the male targeted set of genes and comparing the expression levels of (c) with the range of control expression levels of the male targeted set of genes.

12-13. (canceled)

14. The method of claim 1, wherein the biological sample comprises isolated hematopoietic endothelial precursor cells (EPCs), fractions thereof, or secretions thereof.

15-18. (canceled)

19. A method for analyzing a biological sample obtained from a subject, comprising:
(i) subjecting a plurality of hematopoietic endothelial precursor cells (EPCs), fractions of the plurality of hematopoietic EPCs, secretions of the plurality of hematopoietic EPCs, or any combination thereof isolated from the biological sample, to a gene expression analysis, wherein the gene expression analysis comprises assaying expression levels of two or more genes from a plurality of identified genes;
(ii) generating an output comprising the gene expression levels, wherein the gene expression levels are indicative of the subject having a condition selected from ischemic cardiovascular disease, ischemic heart disease, coronary artery disease, cardiovascular congenital disease, hypertrophic or dilating cardiomyopathy, heart failure; and
(iii) providing a treatment to the subject, the treatment selected from the group consisting of beta-blockers, calcium channels antagonists, nitrates, aspirin, cholesterol-lowering compounds, angiotensin converting enzyme (ACE) inhibitors, and ranolazine.

20. The method of claim 19, wherein the plurality of hematopoietic EPCs comprises a cell surface marker of Flk-I/KDR.

21-24. (canceled)

25. The method of claim 19, wherein the plurality of identified genes comprises a female targeted set of genes and a male targeted set of genes, wherein the female targeted set of genes comprises a plurality of genes listed in Tables 1, 3, and 5, wherein the male targeted set of genes comprises a plurality of genes listed in Tables 2, 4, and 6.

26-27. (canceled)

28. The method of claim 19, further comprising obtaining a range of control expression levels of a female targeted set of genes or of a male targeted set of genes and comparing the gene expression levels from (i) to a range of control expression levels.

29-67. (canceled)

68. The method of claim 1, wherein when the subject is a female subject, further comprising assaying less than 60 genes from the plurality of genes listed in Tables 1, 3, and 5.

69. The method of claim 1, wherein when the subject is a male subject, further comprising assaying less than 40 genes from the plurality of genes listed in Tables 2, 4, and 6.

70. The method of claim 1, wherein the sample comprises hematopoietic EPCs, and wherein the hematopoietic EPCs are positive for makers selected from the group consisting of VEGFR2, CD309, Flt1, Flt4, KDRT, VEGFRT, CXCR4, CD31, CD34, CD105, CD133, Sca-1, and c-Kit.

71. The method of claim 1, wherein the sample comprises isolated Flk1+ cells, fractions thereof, or secretions thereof.

72. The method of claim 19, wherein the female target set of genes comprises one or more, two or more, three or more, four or more, five or more, six or more, seven or more, eight or more, nine or more, ten or more, twenty or more, thirty or more, forty or more, fifty or more, sixty or more, seventy or more, eighty or more, ninety or more, one hundred or more, two hundred or more, or three hundred or more of the genes selected from the group consisting of ZNF807, LOC100130331, LOC100130872, LINC01502, FAM66A, SRGAP3-AS3, MIR1185-1, MIR1266, MIR1261, MIR4262, MTRNR2L10, MIR3928, LOC100507065, LOC100507642, MIR1273F, MIR4519, MIR4799, MIR4747, PTPRU, LOC100996660, DNAL4, XXYLT1-AS2, LOC101927230, LOC101927377, LOC101927479, LOC101927503, LINC01186, LOC101927735, LOC101927880, LINC01486, LOC101928775, RHOXF1P1, LOC101929108, LOC101929330, LOC101929696, CEACAM5, LAMTOR5, CELP, SLC27A4, RCC1, STMN2, CAPN11, FDX1L, MIR155HG, CSMD2, PNMA5, HSPA12B, CLN5, LRRC38, COL3A1, ARHGEF19, PROKR2, COX6C, PTRH1, KRTAP13-1, ASB9, CRYGC, VTI1A, BEST3, SLC22A31, ADIG, LINC01104, PYDC2, PRSS3P2, OTUD7A, DCC, RBM46, TCEANC, ADAMTS17, EFNA5, CELSR2, U2AF1L4, PIKFYVE, KCTD6, PTPLB, EMX1, OR9I1, JAZF1, LAMB4, FOXC2, NCOA6, MESDC2, FBX028, DNMBP, U2SURP, ABCA6, CBX5, CBLC, KIF4A, C20orfI 66-AS1, NUDT8, NUP210P1, SMCOI, MAP7D2, ALX3, FAM133B, SUN2, HECTD1, WIPI2, SNORD53, GJA8, DHDH, GPR4, MRGPRG-AS 1, LOC283731, LINC00304, ZNF763, IGHV1-58, LOC284933, RBMY1A3P, GPX5, MED4, C6orfI5, GUCY1A2, GUCA2A, HUNK, TFAP2E, POTEA, LEUTX, OR2T3, IGFALS, C19orf45, FAM99A, IGFL3, OR2M1P, FAM90A25P, C8orf86, TMEM8C, PABPN1L, LIG4, FLJ26245, KRT16P2, PRSS57, LTBP3, MIR215, ARSF, MEF2C, IQSEC3, LOC441179, ZNRF2P1, MT1M, MTIF2, MY07A, NDUFB9, ATP2B1, MIR422A, CEND1, LARS, UFM1, PDHA2, CES1P1, PLTP, LURAP1, MRPS21, MED1, PPP1R3C, RBM41, ASIC4, ZNF821, PPP1R9A, TRMU, UTP6, CCDC177, TBC1D24, GPR158, NYNRIN, BAI2, GBA3, PTPRO, RAC3, CDH26, RPLPO, BGN, FAM204A, PJA1, MT1IP, SHBG, LOC646513, SLA, SKOR2, SLC34A1, SNRPD1, SOX9, SP1, MIR532, TDG, TNNI3, DNLZ, LOC729739, CBA, VIPR2, USP7, DDX39B, ICE2, DCSTAMP, HIST1H4J, ZNF484, REG4, LRRIQ1, FAM126A, DOCK7, RNMT, ST3GAL5, GAL3ST3, SLC25A21, FATE1, UNC5A, TBX18, FIBP, DLGAP1, MGME1, SYCE1, HAND1, TNFRSF8, MAP4K4, GOSR1, SETDB1, SLC23A2, DOPEY2, and TBX5-AS1.

73. The method of claim 19, wherein the male target set of genes comprises one or more, two or more, three or more, four or more, five or more, six or more, seven or more, eight or more, nine or more, ten or more, twenty or more, thirty or more, forty or more, fifty or more, sixty or more, seventy or more, eighty or more, ninety or more, one hundred or more, two hundred or more, or three hundred or more of the genes selected from the group consisting of SNORD115-37, SNORD115-24, SNORA11B, MIR876, COL4A2-AS2, LOC100130373, LOC100130548, LOC100131496, LINC00240, BCL2L11, MED 16, ERVV-2, KRTAP21-3, LOC100289230, LOC100289283, MIR1275, MIR1912, MIR1302-7, MIR1231, MIR1238, MIR1179, MIR1908, MIR1237, MIR2116, CSN1S2BP, MIR3148, MIR4280, MIR3116-1, MIR3129, MIR4275, MIR4326, MIR4254, LINC00673, MIR3926-2, MIR3678, MIR548Z, MIR3657, MIR3935, LOC100505478, LINC01364, C16orf95, LINC00837, MIR3529, MIR4475, MIR4492, MIR4784, MIR4732, MIR4684, MIR4773-2, MIR4429, MIR4442, LINC00507, LOC100996345, CYYR1-AS1, LOC100996635, CDK4, LOC101927053, PDZRN3-AS1, MEOX2-AS1, LINCOI 186, NA, GBAT2, LINC01214, LOC101928101, LOC101928118, NA, LOC101928195, LOC101928385, TCONS_00029157, LOC101928668, LINC01450, NA, LOC101928823, LOC101928919, LINC01262, LOC101929031, LOC101929159, LOC101929468, LOC101929497, ZNF267, CHERP, IFI44, FUT9, RFPL2, IFI44L, MAPRE2, SLC27A5, CHD1, RABL2B, FSTL1, MRPL3, GLB1L3, GPR182, CHRM5, SMIM12, LRRC37B, SMYD4, TBCB, KLHDC3, RPL39L, CLTB, PRSS30P, PCP2, FITM2, SNTN, TMEM68, OTUD6A, CRP, DYNLL2, CRYGD, NA, TMC8, CSTB, SLC35F3, CCDC140, WDSUB1, SH3D19, TEX28, FEZF1-AS1, ESC02, ZNF645, CYP51A1, DAB1, ZCCHC12, DNMT3A, DRP2, EGR2, ABCA2, CDY2B, SENP5, EVI2B, ALCAM, ABCD1, F12, FAH, OR5A2, CCDC89, FABP5P3, FGF4, FGF14, DIP2A, ATP1 IB, NUP210, EXOC6B, ARC, SASH1, GRIP1, SEC61G, SCRIB, POLA2, GABARAPL1, DEFB108B, DEFB113, FTH1P3, CDRT15L2, HEATR9, ALS2CL, ASPM, OR2F1, GATA2, PLA2G2D, GCNT1, AGOI, OR7A5, OR1J2, SNORA70, GNAI3, BCL9L, OTOGL, SLC46A3, EWSAT1, LINC00927, C16orf54, MAMSTR, MCHR1, LOC284825, IGHD2-21, IGHD2-15, EOGT, C8orf31, IGLV10-54, IGLV3-12, SNX24, ARHGAP35, SCG3, PYCR2, SLC39A3, H3F3B, ANXA5, CXXC1, CDR2L, HNF4A, HNRNPK, SNORD56B, KRTAP20-1, KRTAP20-2, LOC339166, ZFP69, LOC340074, KIAA1875, OR2T8, PAQR9, IFNGR1, IGFBP1, KRTAPIO-IO, IL13RA1, KCNA3, KCNA5, TPTE2P6, LHFPL3, KCNJ10, LINC00162, KCNS3, KRTAP5-1, CC2D2B, RPRML, LRRC14B, OR52N2, LAMA4, LIPE, LINC00200, LINC00668, ZNF880, LOC400756, ASB18, LRRDI, LDLRAD2, LYN, MIR127, MIR210, MIR181A1, MIR9-1, MIR98, MIR99B, MIR17HG, MAFG, MAS1, MAX, MLF1, SUGT1P1, RPS26P11, MYOIO, NDUFB9, NKX3-1, NOS1, NRGN, MIR375, DUOX2, RRP15, NMD3, KLHL5, RPL26L1, EGFL7, PCYT1A, CDC40, UFC1, ERGIC3, SF3B6, PFDN4, PIK3C2G, DDIT4, EGLN1, FAM20A, HEATR3, CEP72, THSD1, PSME2, MIR362, MIR494, MIR520C, MIR51662, MIR502, MIR508, ERMN, RANBP10, SH3RF1, FBRSL1, RET, EXOC4, TGIF2, RPL3L, BCORL1, CCL5, SDCBP, RRAGC, XYLT2, ACOT6, POPDC3, LINC00535, CCT6P1, TSG1, NA, BLVRA, NARFL, CSMD1, SGSH, NDST4, NA, EFTUD1P1, SIPA1, SLC5A4, PCP4L1, SLC9A2, LYNX1, MIR539, CAPN15, SPAG1, SPRR3, SQLE, SRI, SCARNA2, SCARNA16, TACR1, SNORD66, SNORD84, SNORD91A, SNORD97, MIR552, MIR563, MIR591, TCF19, TNP1, MIR660, SDHAP3, LOC729224, FAHD2CP, SEC14L6, MEIS1-AS3, WNT9A, SNORD113-3, SNORD114-3, SNORD1 14-9, SNORD114-18, SNORD114-27, SNORD114-30, MIR758, MIR668, ZNF134, PPDPF, OR5H2, CERS4, OGFOD2, LIN28A, NEK11, DCAKD, GPR157, EFHC2, CXXC4, PBX4, CPTP, NPRL3, OR2B2, AKAP17A, PCDH11Y, FAM103A1, TRAPPC9, HYAL3, CASP5, TTTY11, RAB34, NACAP1, SPOP, ZMYND12, LLPH, C22orf23, GTPBP3, SUV420H2, HAT1, SHANK3, KIAA1755, DENR, NPFF, MARCO, JRKL, PAGE1, PABPC4, SYNGAP1, SGPL1, BUD31, HIST1H3F, SYT8, MAP7, ZFAND2A, RGN, VAPB, RCSD1, SLIT2, NCR2, PAGE4, RNF7, MTFR1, CD59, and ATP2C2.

74. The method of claim 19, wherein when the subject is a female subject, further comprising assaying less than 60 genes from the plurality of genes listed in Tables 1, 3, and 5.

75. The method of claim 19, wherein when the subject is a male subject, further comprising assaying less than 40 genes from the plurality of genes listed in Tables 2, 4, and 6.

76. The method of claim 19, wherein the sample comprises hematopoietic EPCs, and wherein the hematopoietic EPCs are positive for makers selected from the group consisting of VEGFR2, CD309, Flt1, Flt4, KDRT, VEGFRT, CXCR4, CD31, CD34, CD105, CD133, Sca-1, and c-Kit.

78. The method of claim 19, wherein the sample comprises isolated Flk1+ cells, fractions thereof, or secretions thereof.
